United States Patent Application Publication US 2023/0087228 A1 - sequence listing, part 15

SEQ ID NO: 1113 - DNA, 103381 bp, Artificial Sequence
  Synthetic Oligonucleotide
  misc_feature (1)..(96209): n is a, c, g, or t
nnnnnnnnnnnnnnnnnnnnnnnnnnnnnnnnnnnnnnnnnnnnnnnnnnnnnnnnnnnnnnnnnnnnnnnnnnnnnnnnnnnnnnnnnnnnnnnnnnnnnnnnnnnnnnnnnnnnnnnnnnnnnnnnnnnnnnnnnnnnnnnnnnnnnnnnnnnnnnnnnnnnnnnnnnnnnnnnnnnnnnnnnnnnnnnnnnnnnnnnnnnnnnnnnnnnnnnnnnnnnnnnnnnnnnnnnnnnnnnnnnnnnnnnnnnnnnnnnnnnnnnnnnnnnnnnnnnnnnnnnnnnnnnnnnnnnnnnnnnnnnnnnnnnnnnnnnnnnnnnnnnnnnnnnnnnnnnnnnnnnnnnnnnnnnnnnnnnnnnnnnnnnnnnnnnnnnnnnnnnnnnnnnnnnnnnnnnnnnnnnnnnnnnnnnnnnnnnnnnnnnnnnnnnnnnnnnnnnnnnnnnnnnnnnnnnnnnnnnnnnnnnnnnnnnnnnnnnnnnnnnnnnnnnnnnnnnnnnnnnnnnnnnnnnnnnnnnnnnnnnnnnnnnnnnnnnnnnnnnnnnnnnnnnnnnnnnnnnnnnnnnnnnnnnnnnnnnnnnnnnnnnnnnnnnnnnnnnnnnnnnnnnnnnnnnnnnnnnnnnnnnnnnnnnnnnnnnnnnnnnnnnnnnnnnnnnnnnnnnnnnnnnnnnnnnnnnnnnnnnnnnnnnnnnnnnnnnnnnnnnnnnnnnnnnnnnnnnnnnnnnnnnnnnnnnnnnnnnnnnnnnnnnnnnnnnnnnnnnnnnnnnnnnnnnnnnnnnnnnnnnnnnnnnnnnnnnnnnnnnnnnnnnnnnnnnnnnnnnnnnnnnnnnnnnnnnnnnnnnnnnnnnnnnnnnnnnnnnnnnnnnnnnnnnnnnnnnnnnnnnnnnnnnnnnnnnnnnnnnnnnnnnnnnnnnnnnnnnnnnnnnnnnnnnnnnnnnnnnnnnnnnnnnnnnnnnnnnnnnnnnnnnnnnnnnnnnnnnnnnnnnnnnnnnnnnnnnnnnnnnnnnnnnnnnnnnnnnnnnnnnnnnnnnnnnnnnnnnnnnnnnnnnnnnnnnnnnnnnnnnnnnnnnnnnnnnnnnnnnnnnnnnnnnnnnnnnnnnnnnnnnnnnnnnnnnnnnnnnnnnnnnnnnnnnnnnnnnnnnnnnnnnnnnnnnnnnnnnnnnnnnnnnnnnnnnnnnnnnnnnnnnnnnnnnnnnnnnnnnnnnnnnnnnnnnnnnnnnnnnnnnnnnnnnnnnnnnnnnnnnnnnnnnnnnnnnnnnnnnnnnnnnnnnnnnnnnnnnnnnnnnnnnnnnnnnnnnnnnnnnnnnnnnnnnnnnnnnnnnnnnnnnnnnnnnnnnnnnnnnnnnnnnnnnnnnnnnnnnnnnnnnnnnnnnnnnnnnnnnnnnnnnnnnnnnnnnnnnnnnnnnnnnnnnnnnnnnnnnnnnnnnnnnnnnnnnnnnnnnnnnnnnnnnnnnnnnnnnnnnnnnnnnnnnnnnnnnnnnnnnnnnnnnnnnnnnnnnnnnnnnnnnnnnnnnnnnnnnnnnnnnnnnnnnnnnnnnnnnnnnnnnnnnnnnnnnnnnnnnnnnnnnnnnnnnnnnnnnnnnnnnnnnnnnnnnnnnnnnnnnnnnnnnnnnnnnnnnnnnnnnnnnnnnnnnnnnnnnnnnnnnnnnnnnnnnnnnnnnnnnnnnnnnnnnnnnnnnnnnnnnnnnnnnnnnnnnnnnnnnnnnnnnnnnnnnnnnnnnnnnnnnnnnnnnnnnnnnnnnnnnnnnnnnnnnnnnnnnnnnnnnnnnnnnnnnnnnnnnnnnnnnnnnnnnnnnnnnnnnnnnnnnnnnnnnnnnnnnnnnnnnnnnnnnnnnnnnnnnnnnnnnnnnnnnnnnnnnnnnnnnnnnnnnnnnnnnnnnnnnnnnnnnnnnnnnnnnnnnnnnnnnnnnnnnnnnnnnnnnnnnnnnnnnnnnnnnnnnnnnnnnnnnnnnnnnnnnnnnnnnnnnnnnnnnnnnnnnnnnnnnnnnnnnnnnnnnnnnnnnnnnnnnnnnnnnnnnnnnnnnnnnnnnnnnnnnnnnnnnnnnnnnnnnnnnnnnnnnnnnnnnnnnnnnnnnnnnnnnnnnnnnnnnnnnnnnnnnnnnnnnnnnnnnnnnnnnnnnnnnnnnnnnnnnnnnnnnnnnnnnnnnnnnnnnnnnnnnnnnnnnnnnnnnnnnnnnnnnnnnnnnnnnnnnnnnnnnnnnnnnnnnnnnnnnnnnnnnnnnnnnnnnnnnnnnnnnnnnnnnnnnnnnnnnnnnnnnnnnnnnnnnnnnnnnnnnnnnnnnnnnnnnnnnnnnnnnnnnnnnnnnnnnnnnnnnnnnnnnnnnnnnnnnnnnnnnnnnnnnnnnnnnnnnnnnnnnnnnnnnnnnnnnnnnnnnnnnnnnnnnnnnnnnnnnnnnnnnnnnnnnnnnnnnnnnnnnnnnnnnnnnnnnnnnnnnnnnnnnnnnnnnnnnnnnnnnnnnnnnnnnnnnnnnnnnnnnnnnnnnnnnnnnnnnnnnnnnnnnnnnnnnnnnnnnnnnnnnnnnnnnnnnnnnnnnnnnnnnnnnnnnnnnnnnnnnnnnnnnnnnnnnnnnnnnnnnnnnnnnnnnnnnnnnnnnnnnnnnnnnnnnnnnnnnnnnnnnnnnnnnnnnnnnnnnnnnnnnnnnnnnnnnnnnnnnnnnnnnnnnnnnnnnnnnnnnnnnnnnnnnnnnnnnnnnnnnnnnnnnnnnnnnnnnnnnnnnnnnnnnnnnnnnnnnnnnnnnnnnnnnnnnnnnnnnnnnnnnnnnnnnnnnnnnnnnnnnnnnnnnnnnnnnnnnnnnnnnnnnnnnnnnnnnnnnnnnnnnnnnnnnnnnnnnnnnnnnnnnnnnnnnnnnnnnnnnnnnnnnnnnnnnnnnnnnnnnnnnnnnnnnnnnnnnnnnnnnnnnnnnnnnnnnnnnnnnnnnnnnnnnnnnnnnnnnnnnnnnnnnnnnnnnnnnnnnnnnnnnnnnnnnnnnnnnnnnnnnnnnnnnnnnnnnnnnnnnnnnnnnnnnnnnnnnnnnnnnnnnnnnnnnnnnnnnnnnnnnnnnnnnnnnnnnnnnnnnnnnnnnnnnnnnnnnnnnnnnnnnnnnnnnnnnnnnnnnnnnnnnnnnnnnnnnnnnnnnnnnnnnnnnnnnnnnnnnnnnnnnnnnnnnnnnnnnnnnnnnnnnnnnnnnnnnnnnnnnnnnnnnnnnnnnnnnnnnnnnnnnnnnnnnnnnnnnnnnnnnnnnnnnnnnnnnnnnnnnnnnnnnnnnnnnnnnnnnnnnnnnnnnnnnnnnnnnnnnnnnnnnnnnnnnnnnnnnnnnnnnnnnnnnnnnnnnnnnnnnnnnnnnnnnnnnnnnnnnnnnnnnnnnnnnnnnnnnnnnnnnnnnnnnnnnnnnnnnnnnnnnnnnnnnnnnnnnnnnnnnnnnnnnnnnnnnnnnnnnnnnnnnnnnnnnnnnnnnnnnnnnnnnnnnnnnnnnnnnnnnnnnnnnnnnnnnnnnnnnnnnnnnnnnnnnnnnnnnnnnnnnnnnnnnnnnnnnnnnnnnnnnnnnnnnnnnnnnnnnnnnnnnnnnnnnnnnnnnnnnnnnnnnnnnnnnnnnnnnnnnnnnnnnnnnnnnnnnnnnnnnnnnnnnnnnnnnnnnnnnnnnnnnnnnnnnnnnnnnnnnnnnnnnnnnnnnnnnnnnnnnnnnnnnnnnnnnnnnnnnnnnnnnnnnnnnnnnnnnnnnnnnnnnnnnnnnnnnnnnnnnnnnnnnnnnnnnnnnnnnnnnnnnnnnnnnnnnnnnnnnnnnnnnnnnnnnnnnnnnnnnnnnnnnnnnnnnnnnnnnnnnnnnnnnnnnnnnnnnnnnnnnnnnnnnnnnnnnnnnnnnnnnnnnnnnnnnnnnnnnnnnnnnnnnnnnnnnnnnnnnnnnnnnnnnnnnnnnnnnnnnnnnnnnnnnnnnnnnnnnnnnnnnnnnnnnnnnnnnnnnnnnnnnnnnnnnnnnnnnnnnnnnnnnnnnnnnnnnnnnnnnnnnnnnnnnnnnnnnnnnnnnnnnnnnnnnnnnnnnnnnnnnnnnnnnnnnnnnnnnnnnnnnnnnnnnnnnnnnnnnnnnnnnnnnnnnnnnnnnnnnnnnnnnnnnnnnnnnnnnnnnnnnnnnnnnnnnnnnnnnnnnnnnnnnnnnnnnnnnnnnnnnnnnnnnnnnnnnnnnnnnnnnnnnnnnnnnnnnnnnnnnnnnnnnnnnnnnnnnnnnnnnnnnnnnnnnnnnnnnnnnnnnnnnnnnnnnnnnnnnnnnnnnnnnnnnnnnnnnnnnnnnnnnnnnnnnnnnnnnnnnnnnnnnnnnnnnnnnnnnnnnnnnnnnnnnnnnnnnnnnnnnnnnnnnnnnnnnnnnnnnnnnnnnnnnnnnnnnnnnnnnnnnnnnnnnnnnnnnnnnnnnnnnnnnnnnnnnnnnnnnnnnnnnnnnnnnnnnnnnnnnnnnnnnnnnnnnnnnnnnnnnnnnnnnnnnnnnnnnnnnnnnnnnnnnnnnnnnnnnnnnnnnnnnnnnnnnnnnnnnnnnnnnnnnnnnnnnnnnnnnnnnnnnnnnnnnnnnnnnnnnnnnnnnnnnnnnnnnnnnnnnnnnnnnnnnnnnnnnnnnnnnnnnnnnnnnnnnnnnnnnnnnnnnnnnnnnnnnnnnnnnnnnnnnnnnnnnnnnnnnnnnnnnnnnnnnnnnnnnnnnnnnnnnnnnnnnnnnnnnnnnnnnnnnnnnnnnnnnnnnnnnnnnnnnnnnnnnnnnnnnnnnnnnnnnnnnnnnnnnnnnnnnnnnnnnnnnnnnnnnnnnnnnnnnnnnnnnnnnnnnnnnnnnnnnnnnnnnnnnnnnnnnnnnnnnnnnnnnnnnnnnnnnnnnnnnnnnnnnnnnnnnnnnnnnnnnnnnnnnnnnnnnnnnnnnnnnnnnnnnnnnnnnnnnnnnnnnnnnnnnnnnnnnnnnnnnnnnnnnnnnnnnnnnnnnnnnnnnnnnnnnnnnnnnnnnnnnnnnnnnnnnnnnnnnnnnnnnnnnnnnnnnnnnnnnnnnnnnnnnnnnnnnnnnnnnnnnnnnnnnnnnnnnnnnnnnnnnnnnnnnnnnnnnnnnnnnnnnnnnnnnnnnnnnnnnnnnnnnnnnnnnnnnnnnnnnnnnnnnnnnnnnnnnnnnnnnnnnnnnnnnnnnnnnnnnnnnnnnnnnnnnnnnnnnnnnnnnnnnnnnnnnnnnnnnnnnnnnnnnnnnnnnnnnnnnnnnnnnnnnnnnnnnnnnnnnnnnnnnnnnnnnnnnnnnnnnnnnnnnnnnnnnnnnnnnnnnnnnnnnnnnnnnnnnnnnnnnnnnnnnnnnnnnnnnnnnnnnnnnnnnnnnnnnnnnnnnnnnnnnnnnnnnnnnnnnnnnnnnnnnnnnnnnnnnnnnnnnnnnnnnnnnnnnnnnnnnnnnnnnnnnnnnnnnnnnnnnnnnnnnnnnnnnnnnnnnnnnnnnnnnnnnnnnnnnnnnnnnnnnnnnnnnnnnnnnnnnnnnnnnnnnnnnnnnnnnnnnnnnnnnnnnnnnnnnnnnnnnnnnnnnnnnnnnnnnnnnnnnnnnnnnnnnnnnnnnnnnnnnnnnnnnnnnnnnnnnnnnnnnnnnnnnnnnnnnnnnnnnnnnnnnnnnnnnnnnnnnnnnnnnnnnnnnnnnnnnnnnnnnnnnnnnnnnnnnnnnnnnnnnnnnnnnnnnnnnnnnnnnnnnnnnnnnnnnnnnnnnnnnnnnnnnnnnnnnnnnnnnnnnnnnnnnnnnnnnnnnnnnnnnnnnnnnnnnnnnnnnnnnnnnnnnnnnnnnnnnnnnnnnnnnnnnnnnnnnnnnnnnnnnnnnnnnnnnnnnnnnnnnnnnnnnnnnnnnnnnnnnnnnnnnnnnnnnnnnnnnnnnnnnnnnnnnnnnnnnnnnnnnnnnnnnnnnnnnnnnnnnnnnnnnnnnnnnnnnnnnnnnnnnnnnnnnnnnnnnnnnnnnnnnnnnnnnnnnnnnnnnnnnnnnnnnnnnnnnnnnnnnnnnnnnnnnnnnnnnnnnnnnnnnnnnnnnnnnnnnnnnnnnnnnnnnnnnnnnnnnnnnnnnnnnnnnnnnnnnnnnnnnnnnnnnnnnnnnnnnnnnnnnnnnnnnnnnnnnnnnnnnnnnnnnnnnnnnnnnnnnnnnnnnnnnnnnnnnnnnnnnnnnnnnnnnnnnnnnnnnnnnnnnnnnnnnnnnnnnnnnnnnnnnnnnnnnnnnnnnnnnnnnnnnnnnnnnnnnnnnnnnnnnnnnnnnnnnnnnnnnnnnnnnnnnnnnnnnnnnnnnnnnnnnnnnnnnnnnnnnnnnnnnnnnnnnnnnnnnnnnnnnnnnnnnnnnnnnnnnnnnnnnnnnnnnnnnnnnnnnnnnnnnnnnnnnnnnnnnnnnnnnnnnnnnnnnnnnnnnnnnnnnnnnnnnnnnnnnnnnnnnnnnnnnnnnnnnnnnnnnnnnnnnnnnnnnnnnnnnnnnnnnnnnnnnnnnnnnnnnnnnnnnnnnnnnnnnnnnnnnnnnnnnnnnnnnnnnnnnnnnnnnnnnnnnnnnnnnnnnnnnnnnnnnnnnnnnnnnnnnnnnnnnnnnnnnnnnnnnnnnnnnnnnnnnnnnnnnnnnnnnnnnnnnnnnnnnnnnnnnnnnnnnnnnnnnnnnnnnnnnnnnnnnnnnnnnnnnnnnnnnnnnnnnnnnnnnnnnnnnnnnnnnnnnnnnnnnnnnnnnnnnnnnnnnnnnnnnnnnnnnnnnnnnnnnnnnnnnnnnnnnnnnnnnnnnnnnnnnnnnnnnnnnnnnnnnnnnnnnnnnnnnnnnnnnnnnnnnnnnnnnnnnnnnnnnnnnnnnnnnnnnnnnnnnnnnnnnnnnnnnnnnnnnnnnnnnnnnnnnnnnnnnnnnnnnnnnnnnnnnnnnnnnnnnnnnnnnnnnnnnnnnnnnnnnnnnnnnnnnnnnnnnnnnnnnnnnnnnnnnnnnnnnnnnnnnnnnnnnnnnnnnnnnnnnnnnnnnnnnnnnnnnnnnnnnnnnnnnnnnnnnnnnnnnnnnnnnnnnnnnnnnnnnnnnnnnnnnnnnnnnnnnnnnnnnnnnnnnnnnnnnnnnnnnnnnnnnnnnnnnnnnnnnnnnnnnnnnnnnnnnnnnnnnnnnnnnnnnnnnnnnnnnnnnnnnnnnnnnnnnnnnnnnnnnnnnnnnnnnnnnnnnnnnnnnnnnnnnnnnnnnnnnnnnnnnnnnnnnnnnnnnnnnnnnnnnnnnnnnnnnnnnnnnnnnnnnnnnnnnnnnnnnnnnnnnnnnnnnnnnnnnnnnnnnnnnnnnnnnnnnnnnnnnnnnnnnnnnnnnnnnnnnnnnnnnnnnnnnnnnnnnnnnnnnnnnnnnnnnnnnnnnnnnnnnnnnnnnnnnnnnnnnnnnnnnnnnnnnnnnnnnnnnnnnnnnnnnnnnnnnnnnnnnnnnnnnnnnnnnnnnnnnnnnnnnnnnnnnnnnnnnnnnnnnnnnnnnnnnnnnnnnnnnnnnnnnnnnnnnnnnnnnnnnnnnnnnnnnnnnnnnnnnnnnnnnnnnnnnnnnnnnnnnnnnnnnnnnnnnnnnnnnnnnnnnnnnnnnnnnnnnnnnnnnnnnnnnnnnnnnnnnnnnnnnnnnnnnnnnnnnnnnnnnnnnnnnnnnnnnnnnnnnnnnnnnnnnnnnnnnnnnnnnnnnnnnnnnnnnnnnnnnnnnnnnnnnnnnnnnnnnnnnnnnnnnnnnnnnnnnnnnnnnnnnnnnnnnnnnnnnnnnnnnnnnnnnnnnnnnnnnnnnnnnnnnnnnnnnnnnnnnnnnnnnnnnnnnnnnnnnnnnnnnnnnnnnnnnnnnnnnnnnnnnnnnnnnnnnnnnnnnnnnnnnnnnnnnnnnnnnnnnnnnnnnnnnnnnnnnnnnnnnnnnnnnnnnnnnnnnnnnnnnnnnnnnnnnnnnnnnnnnnnnnnnnnnnnnnnnnnnnnnnnnnnnnnnnnnnnnnnnnnnnnnnnnnnnnnnnnnnnnnnnnnnnnnnnnnnnnnnnnnnnnnnnnnnnnnnnnnnnnnnnnnnnnnnnnnnnnnnnnnnnnnnnnnnnnnnnnnnnnnnnnnnnnnnnnnnnnnnnnnnnnnnnnnnnnnnnnnnnnnnnnnnnnnnnnnnnnnnnnnnnnnnnnnnnnnnnnnnnnnnnnnnnnnnnnnnnnnnnnnnnnnnnnnnnnnnnnnnnnnnnnnnnnnnnnnnnnnnnnnnnnnnnnnnnnnnnnnnnnnnnnnnnnnnnnnnnnnnnnnnnnnnnnnnnnnnnnnnnnnnnnnnnnnnnnnnnnnnnnnnnnnnnnnnnnnnnnnnnnnnnnnnnnnnnnnnnnnnnnnnnnnnnnnnnnnnnnnnnnnnnnnnnnnnnnnnnnnnnnnnnnnnnnnnnnnnnnnnnnnnnnnnnnnnnnnnnnnnnnnnnnnnnnnnnnnnnnnnnnnnnnnnnnnnnnnnnnnnnnnnnnnnnnnnnnnnnnnnnnnnnnnnnnnnnnnnnnnnnnnnnnnnnnnnnnnnnnnnnnnnnnnnnnnnnnnnnnnnnnnnnnnnnnnnnnnnnnnnnnnnnnnnnnnnnnnnnnnnnnnnnnnnnnnnnnnnnnnnnnnnnnnnnnnnnnnnnnnnnnnnnnnnnnnnnnnnnnnnnnnnnnnnnnnnnnnnnnnnnnnnnnnnnnnnnnnnnnnnnnnnnnnnnnnnnnnnnnnnnnnnnnnnnnnnnnnnnnnnnnnnnnnnnnnnnnnnnnnnnnnnnnnnnnnnnnnnnnnnnnnnnnnnnnnnnnnnnnnnnnnnnnnnnnnnnnnnnnnnnnnnnnnnnnnnnnnnnnnnnnnnnnnnnnnnnnnnnnnnnnnnnnnnnnnnnnnnnnnnnnnnnnnnnnnnnnnnnnnnnnnnnnnnnnnnnnnnnnnnnnnnnnnnnnnnnnnnnnnnnnnnnnnnnnnnnnnnnnnnnnnnnnnnnnnnnnnnnnnnnnnnnnnnnnnnnnnnnnnnnnnnnnnnnnnnnnnnnnnnnnnnnnnnnnnnnnnnnnnnnnnnnnnnnnnnnnnnnnnnnnnnnnnnnnnnnnnnnnnnnnnnnnnnnnnnnnnnnnnnnnnnnnnnnnnnnnnnnnnnnnnnnnnnnnnnnnnnnnnnnnnnnnnnnnnnnnnnnnnnnnnnnnnnnnnnnnnnnnnnnnnnnnnnnnnnnnnnnnnnnnnnnnnnnnnnnnnnnnnnnnnnnnnnnnnnnnnnnnnnnnnnnnnnnnnnnnnnnnnnnnnnnnnnnnnnnnnnnnnnnnnnnnnnnnnnnnnnnnnnnnnnnnnnnnnnnnnnnnnnnnnnnnnnnnnnnnnnnnnnnnnnnnnnnnnnnnnnnnnnnnnnnnnnnnnnnnnnnnnnnnnnnnnnnnnnnnnnnnnnnnnnnnnnnnnnnnnnnnnnnnnnnnnnnnnnnnnnnnnnnnnnnnnnnnnnnnnnnnnnnnnnnnnnnnnnnnnnnnnnnnnnnnnnnnnnnnnnnnnnnnnnnnnnnnnnnnnnnnnnnnnnnnnnnnnnnnnnnnnnnnnnnnnnnnnnnnnnnnnnnnnnnnnnnnnnnnnnnnnnnnnnnnnnnnnnnnnnnnnnnnnnnnnnnnnnnnnnnnnnnnnnnnnnnnnnnnnnnnnnnnnnnnnnnnnnnnnnnnnnnnnnnnnnnnnnnnnnnnnnnnnnnnnnnnnnnnnnnnnnnnnnnnnnnnnnnnnnnnnnnnnnnnnnnnnnnnnnnnnnnnnnnnnnnnnnnnnnnnnnnnnnnnnnnnnnnnnnnnnnnnnnnnnnnnnnnnnnnnnnnnnnnnnnnnnnnnnnnnnnnnnnnnnnnnnnnnnnnnnnnnnnnnnnnnnnnnnnnnnnnnnnnnnnnnnnnnnnnnnnnnnnnnnnnnnnnnnnnnnnnnnnnnnnnnnnnnnnnnnnnnnnnnnnnnnnnnnnnnnnnnnnnnnnnnnnnnnnnnnnnnnnnnnnnnnnnnnnnnnnnnnnnnnnnnnnnnnnnnnnnnnnnnnnnnnnnnnnnnnnnnnnnnnnnnnnnnnnnnnnnnnnnnnnnnnnnnnnnnnnnnnnnnnnnnnnnnnnnnnnnnnnnnnnnnnnnnnnnnnnnnnnnnnnnnnnnnnnnnnnnnnnnnnnnnnnnnnnnnnnnnnnnnnnnnnnnnnnnnnnnnnnnnnnnnnnnnnnnnnnnnnnnnnnnnnnnnnnnnnnnnnnnnnnnnnnnnnnnnnnnnnnnnnnnnnnnnnnnnnnnnnnnnnnnnnnnnnnnnnnnnnnnnnnnnnnnnnnnnnnnnnnnnnnnnnnnnnnnnnnnnnnnnnnnnnnnnnnnnnnnnnnnnnnnnnnnnnnnnnnnnnnnnnnnnnnnnnnnnnnnnnnnnnnnnnnnnnnnnnnnnnnnnnnnnnnnnnnnnnnnnnnnnnnnnnnnnnnnnnnnnnnnnnnnnnnnnnnnnnnnnnnnnnnnnnnnnnnnnnnnnnnnnnnnnnnnnnnnnnnnnnnnnnnnnnnnnnnnnnnnnnnnnnnnnnnnnnnnnnnnnnnnnnnnnnnnnnnnnnnnnnnnnnnnnnnnnnnnnnnnnnnnnnnnnnnnnnnnnnnnnnnnnnnnnnnnnnnnnnnnnnnnnnnnnnnnnnnnnnnnnnnnnnnnnnnnnnnnnnnnnnnnnnnnnnnnnnnnnnnnnnnnnnnnnnnnnnnnnnnnnnnnnnnnnnnnnnnnnnnnnnnnnnnnnnnnnnnnnnnnnnnnnnnnnnnnnnnnnnnnnnnnnnnnnnnnnnnnnnnnnnnnnnnnnnnnnnnnnnnnnnnnnnnnnnnnnnnnnnnnnnnnnnnnnnnnnnnnnnnnnnnnnnnnnnnnnnnnnnnnnnnnnnnnnnnnnnnnnnnnnnnnnnnnnnnnnnnnnnnnnnnnnnnnnnnnnnnnnnnnnnnnnnnnnnnnnnnnnnnnnnnnnnnnnnnnnnnnnnnnnnnnnnnnnnnnnnnnnnnnnnnnnnnnnnnnnnnnnnnnnnnnnnnnnnnnnnnnnnnnnnnnnnnnnnnnnnnnnnnnnnnnnnnnnnnnnnnnnnnnnnnnnnnnnnnnnnnnnnnnnnnnnnnnnnnnnnnnnnnnnnnnnnnnnnnnnnnnnnnnnnnnnnnnnnnnnnnnnnnnnnnnnnnnnnnnnnnnnnnnnnnnnnnnnnnnnnnnnnnnnnnnnnnnnnnnnnnnnnnnnnnnnnnnnnnnnnnnnnnnnnnnnnnnnnnnnnnnnnnnnnnnnnnnnnnnnnnnnnnnnnnnnnnnnnnnnnnnnnnnnnnnnnnnnnnnnnnnnnnnnnnnnnnnnnnnnnnnnnnnnnnnnnnnnnnnnnnnnnnnnnnnnnnnnnnnnnnnnnnnnnnnnnnnnnnnnnnnnnnnnnnnnnnnnnnnnnnnnnnnnnnnnnnnnnnnnnnnnnnnnnnnnnnnnnnnnnnnnnnnnnnnnnnnnnnnnnnnnnnnnnnnnnnnnnnnnnnnnnnnnnnnnnnnnnnnnnnnnnnnnnnnnnnnnnnnnnnnnnnnnnnnnnnnnnnnnnnnnnnnnnnnnnnnnnnnnnnnnnnnnnnnnnnnnnnnnnnnnnnnnnnnnnnnnnnnnnnnnnnnnnnnnnnnnnnnnnnnnnnnnnnnnnnnnnnnnnnnnnnnnnnnnnnnnnnnnnnnnnnnnnnnnnnnnnnnnnnnnnnnnnnnnnnnnnnnnnnnnnnnnnnnnnnnnnnnnnnnnnnnnnnnnnnnnnnnnnnnnnnnnnnnnnnnnnnnnnnnnnnnnnnnnnnnnnnnnnnnnnnnnnnnnnnnnnnnnnnnnnnnnnnnnnnnnnnnnnnnnnnnnnnnnnnnnnnnnnnnnnnnnnnnnnnnnnnnnnnnnnnnnnnnnnnnnnnnnnnnnnnnnnnnnnnnnnnnnnnnnnnnnnnnnnnnnnnnnnnnnnnnnnnnnnnnnnnnnnnnnnnnnnnnnnnnnnnnnnnnnnnnnnnnnnnnnnnnnnnnnnnnnnnnnnnnnnnnnnnnnnnnnnnnnnnnnnnnnnnnnnnnnnnnnnnnnnnnnnnnnnnnnnnnnnnnnnnnnnnnnnnnnnnnnnnnnnnnnnnnnnnnnnnnnnnnnnnnnnnnnnnnnnnnnnnnnnnnnnnnnnnnnnnnnnnnnnnnnnnnnnnnnnnnnnnnnnnnnnnnnnnnnnnnnnnnnnnnnnnnnnnnnnnnnnnnnnnnnnnnnnnnnnnnnnnnnnnnnnnnnnnnnnnnnnnnnnnnnnnnnnnnnnnnnnnnnnnnnnnnnnnnnnnnnnnnnnnnnnnnnnnnnnnnnnnnnnnnnnnnnnnnnnnnnnnnnnnnnnnnnnnnnnnnnnnnnnnnnnnnnnnnnnnnnnnnnnnnnnnnnnnnnnnnnnnnnnnnnnnnnnnnnnnnnnnnnnnnnnnnnnnnnnnnnnnnnnnnnnnnnnnnnnnnnnnnnnnnnnnnnnnnnnnnnnnnnnnnnnnnnnnnnnnnnnnnnnnnnnnnnnnnnnnnnnnnnnnnnnnnnnnnnnnnnnnnnnnnnnnnnnnnnnnnnnnnnnnnnnnnnnnnnnnnnnnnnnnnnnnnnnnnnnnnnnnnnnnnnnnnnnnnnnnnnnnnnnnnnnnnnnnnnnnnnnnnnnnnnnnnnnnnnnnnnnnnnnnnnnnnnnnnnnnnnnnnnnnnnnnnnnnnnnnnnnnnnnnnnnnnnnnnnnnnnnnnnnnnnnnnnnnnnnnnnnnnnnnnnnnnnnnnnnnnnnnnnnnnnnnnnnnnnnnnnnnnnnnnnnnnnnnnnnnnnnnnnnnnnnnnnnnnnnnnnnnnnnnnnnnnnnnnnnnnnnnnnnnnnnnnnnnnnnnnnnnnnnnnnnnnnnnnnnnnnnnnnnnnnnnnnnnnnnnnnnnnnnnnnnnnnnnnnnnnnnnnnnnnnnnnnnnnnnnnnnnnnnnnnnnnnnnnnnnnnnnnnnnnnnnnnnnnnnnnnnnnnnnnnnnnnnnnnnnnnnnnnnnnnnnnnnnnnnnnnnnnnnnnnnnnnnnnnnnnnnnnnnnnnnnnnnnnnnnnnnnnnnnnnnnnnnnnnnnnnnnnnnnnnnnnnnnnnnnnnnnnnnnnnnnnnnnnnnnnnnnnnnnnnnnnnnnnnnnnnnnnnnnnnnnnnnnnnnnnnnnnnnnnnnnnnnnnnnnnnnnnnnnnnnnnnnnnnnnnnnnnnnnnnnnnnnnnnnnnnnnnnnnnnnnnnnnnnnnnnnnnnnnnnnnnnnnnnnnnnnnnnnnnnnnnnnnnnnnnnnnnnnnnnnnnnnnnnnnnnnnnnnnnnnnnnnnnnnnnnnnnnnnnnnnnnnnnnnnnnnnnnnnnnnnnnnnnnnnnnnnnnnnnnnnnnnnnnnnnnnnnnnnnnnnnnnnnnnnnnnnnnnnnnnnnnnnnnnnnnnnnnnnnnnnnnnnnnnnnnnnnnnnnnnnnnnnnnnnnnnnnnnnnnnnnnnnnnnnnnnnnnnnnnnnnnnnnnnnnnnnnnnnnnnnnnnnnnnnnnnnnnnnnnnnnnnnnnnnnnnnnnnnnnnnnnnnnnnnnnnnnnnnnnnnnnnnnnnnnnnnnnnnnnnnnnnnnnnnnnnnnnnnnnnnnnnnnnnnnnnnnnnnnnnnnnnnnnnnnnnnnnnnnnnnnnnnnnnnnnnnnnnnnnnnnnnnnnnnnnnnnnnnnnnnnnnnnnnnnnnnnnnnnnnnnnnnnnnnnnnnnnnnnnnnnnnnnnnnnnnnnnnnnnnnnnnnnnnnnnnnnnnnnnnnnnnnnnnnnnnnnnnnnnnnnnnnnnnnnnnnnnnnnnnnnnnnnnnnnnnnnnnnnnnnnnnnnnnnnnnnnnnnnnnnnnnnnnnnnnnnnnnnnnnnnnnnnnnnnnnnnnnnnnnnnnnnnnnnnnnnnnnnnnnnnnnnnnnnnnnnnnnnnnnnnnnnnnnnnnnnnnnnnnnnnnnnnnnnnnnnnnnnnnnnnnnnnnnnnnnnnnnnnnnnnnnnnnnnnnnnnnnnnnnnnnnnnnnnnnnnnnnnnnnnnnnnnnnnnnnnnnnnnnnnnnnnnnnnnnnnnnnnnnnnnnnnnnnnnnnnnnnnnnnnnnnnnnnnnnnnnnnnnnnnnnnnnnnnnnnnnnnnnnnnnnnnnnnnnnnnnnnnnnnnnnnnnnnnnnnnnnnnnnnnnnnnnnnnnnnnnnnnnnnnnnnnnnnnnnnnnnnnnnnnnnnnnnnnnnnnnnnnnnnnnnnnnnnnnnnnnnnnnnnnnnnnnnnnnnnnnnnnnnnnnnnnnnnnnnnnnnnnnnnnnnnnnnnnnnnnnnnnnnnnnnnnnnnnnnnnnnnnnnnnnnnnnnnnnnnnnnnnnnnnnnnnnnnnnnnnnnnnnnnnnnnnnnnnnnnnnnnnnnnnnnnnnnnnnnnnnnnnnnnnnnnnnnnnnnnnnnnnnnnnnnnnnnnnnnnnnnnnnnnnnnnnnnnnnnnnnnnnnnnnnnnnnnnnnnnnnnnnnnnnnnnnnnnnnnnnnnnnnnnnnnnnnnnnnnnnnnnnnnnnnnnnnnnnnnnnnnnnnnnnnnnnnnnnnnnnnnnnnnnnnnnnnnnnnnnnnnnnnnnnnnnnnnnnnnnnnnnnnnnnnnnnnnnnnnnnnnnnnnnnnnnnnnnnnnnnnnnnnnnnnnnnnnnnnnnnnnnnnnnnnnnnnnnnnnnnnnnnnnnnnnnnnnnnnnnnnnnnnnnnnnnnnnnnnnnnnnnnnnnnnnnnnnnnnnnnnnnnnnnnnnnnnnnnnnnnnnnnnnnnnnnnnnnnnnnnnnnnnnnnnnnnnnnnnnnnnnnnnnnnnnnnnnnnnnnnnnnnnnnnnnnnnnnnnnnnnnnnnnnnnnnnnnnnnnnnnnnnnnnnnnnnnnnnnnnnnnnnnnnnnnnnnnnnnnnnnnnnnnnnnnnnnnnnnnnnnnnnnnnnnnnnnnnnnnnnnnnnnnnnnnnnnnnnnnnnnnnnnnnnnnnnnnnnnnnnnnnnnnnnnnnnnnnnnnnnnnnnnnnnnnnnnnnnnnnnnnnnnnnnnnnnnnnnnnnnnnnnnnnnnnnnnnnnnnnnnnnnnnnnnnnnnnnnnnnnnnnnnnnnnnnnnnnnnnnnnnnnnnnnnnnnnnnnnnnnnnnnnnnnnnnnnnnnnnnnnnnnnnnnnnnnnnnnnnnnnnnnnnnnnnnnnnnnnnnnnnnnnnnnnnnnnnnnnnnnnnnnnnnnnnnnnnnnnnnnnnnnnnnnnnnnnnnnnnnnnnnnnnnnnnnnnnnnnnnnnnnnnnnnnnnnnnnnnnnnnnnnnnnnnnnnnnnnnnnnnnnnnnnnnnnnnnnnnnnnnnnnnnnnnnnnnnnnnnnnnnnnnnnnnnnnnnnnnnnnnnnnnnnnnnnnnnnnnnnnnnnnnnnnnnnnnnnnnnnnnnnnnnnnnnnnnnnnnnnnnnnnnnnnnnnnnnnnnnnnnnnnnnnnnnnnnnnnnnnnnnnnnnnnnnnnnnnnnnnnnnnnnnnnnnnnnnnnnnnnnnnnnnnnnnnnnnnnnnnnnnnnnnnnnnnnnnnnnnnnnnnnnnnnnnnnnnnnnnnnnnnnnnnnnnnnnnnnnnnnnnnnnnnnnnnnnnnnnnnnnnnnnnnnnnnnnnnnnnnnnnnnnnnnnnnnnnnnnnnnnnnnnnnnnnnnnnnnnnnnnnnnnnnnnnnnnnnnnnnnnnnnnnnnnnnnnnnnnnnnnnnnnnnnnnnnnnnnnnnnnnnnnnnnnnnnnnnnnnnnnnnnnnnnnnnnnnnnnnnnnnnnnnnnnnnnnnnnnnnnnnnnnnnnnnnnnnnnnnnnnnnnnnnnnnnnnnnnnnnnnnnnnnnnnnnnnnnnnnnnnnnnnnnnnnnnnnnnnnnnnnnnnnnnnnnnnnnnnnnnnnnnnnnnnnnnnnnnnnnnnnnnnnnnnnnnnnnnnnnnnnnnnnnnnnnnnnnnnnnnnnnnnnnnnnnnnnnnnnnnnnnnnnnnnnnnnnnnnnnnnnnnnnnnnnnnnnnnnnnnnnnnnnnnnnnnnnnnnnnnnnnnnnnnnnnnnnnnnnnnnnnnnnnnnnnnnnnnnnnnnnnnnnnnnnnnnnnnnnnnnnnnnnnnnnnnnnnnnnnnnnnnnnnnnnnnnnnnnnnnnnnnnnnnnnnnnnnnnnnnnnnnnnnnnnnnnnnnnnnnnnnnnnnnnnnnnnnnnnnnnnnnnnnnnnnnnnnnnnnnnnnnnnnnnnnnnnnnnnnnnnnnnnnnnnnnnnnnnnnnnnnnnnnnnnnnnnnnnnnnnnnnnnnnnnnnnnnnnnnnnnnnnnnnnnnnnnnnnnnnnnnnnnnnnnnnnnnnnnnnnnnnnnnnnnnnnnnnnnnnnnnnnnnnnnnnnnnnnnnnnnnnnnnnnnnnnnnnnnnnnnnnnnnnnnnnnnnnnnnnnnnnnnnnnnnnnnnnnnnnnnnnnnnnnnnnnnnnnnnnnnnnnnnnnnnnnnnnnnnnnnnnnnnnnnnnnnnnnnnnnnnnnnnnnnnnnnnnnnnnnnnnnnnnnnnnnnnnnnnnnnnnnnnnnnnnnnnnnnnnnnnnnnnnnnnnnnnnnnnnnnnnnnnnnnnnnnnnnnnnnnnnnnnnnnnnnnnnnnnnnnnnnnnnnnnnnnnnnnnnnnnnnnnnnnnnnnnnnnnnnnnnnnnnnnnnnnnnnnnnnnnnnnnnnnnnnnnnnnnnnnnnnnnnnnnnnnnnnnnnnnnnnnnnnnnnnnnnnnnnnnnnnnnnnnnnnnnnnnnnnnnnnnnnnnnnnnnnnnnnnnnnnnnnnnnnnnnnnnnnnnnnnnnnnnnnnnnnnnnnnnnnnnnnnnnnnnnnnnnnnnnnnnnnnnnnnnnnnnnnnnnnnnnnnnnnnnnnnnnnnnnnnnnnnnnnnnnnnnnnnnnnnnnnnnnnnnnnnnnnnnnnnnnnnnnnnnnnnnnnnnnnnnnnnnnnnnnnnnnnnnnnnnnnnnnnnnnnnnnnnnnnnnnnnnnnnnnnnnnnnnnnnnnnnnnnnnnnnnnnnnnnnnnnnnnnnnnnnnnnnnnnnnnnnnnnnnnnnnnnnnnnnnnnnnnnnnnnnnnnnnnnnnnnnnnnnnnnnnnnnnnnnnnnnnnnnnnnnnnnnnnnnnnnnnnnnnnnnnnnnnnnnnnnnnnnnnnnnnnnnnnnnnnnnnnnnnnnnnnnnnnnnnnnnnnnnnnnnnnnnnnnnnnnnnnnnnnnnnnnnnnnnnnnnnnnnnnnnnnnnnnnnnnnnnnnnnnnnnnnnnnnnnnnnnnnnnnnnnnnnnnnnnnnnnnnnnnnnnnnnnnnnnnnnnnnnnnnnnnnnnnnnnnnnnnnnnnnnnnnnnnnnnnnnnnnnnnnnnnnnnnnnnnnnnnnnnnnnnnnnnnnnnnnnnnnnnnnnnnnnnnnnnnnnnnnnnnnnnnnnnnnnnnnnnnnnnnnnnnnnnnnnnnnnnnnnnnnnnnnnnnnnnnnnnnnnnnnnnnnnnnnnnnnnnnnnnnnnnnnnnnnnnnnnnnnnnnnnnnnnnnnnnnnnnnnnnnnnnnnnnnnnnnnnnnnnnnnnnnnnnnnnnnnnnnnnnnnnnnnnnnnnnnnnnnnnnnnnnnnnnnnnnnnnnnnnnnnnnnnnnnnnnnnnnnnnnnnnnnnnnnnnnnnnnnnnnnnnnnnnnnnnnnnnnnnnnnnnnnnnnnnnnnnnnnnnnnnnnnnnnnnnnnnnnnnnnnnnnnnnnnnnnnnnnnnnnnnnnnnnnnnnnnnnnnnnnnnnnnnnnnnnnnnnnnnnnnnnnnnnnnnnnnnnnnnnnnnnnnnnnnnnnnnnnnnnnnnnnnnnnnnnnnnnnnnnnnnnnnnnnnnnnnnnnnnnnnnnnnnnnnnnnnnnnnnnnnnnnnnnnnnnnnnnnnnnnnnnnnnnnnnnnnnnnnnnnnnnnnnnnnnnnnnnnnnnnnnnnnnnnnnnnnnnnnnnnnnnnnnnnnnnnnnnnnnnnnnnnnnnnnnnnnnnnnnnnnnnnnnnnnnnnnnnnnnnnnnnnnnnnnnnnnnnnnnnnnnnnnnnnnnnnnnnnnnnnnnnnnnnnnnnnnnnnnnnnnnnnnnnnnnnnnnnnnnnnnnnnnnnnnnnnnnnnnnnnnnnnnnnnnnnnnnnnnnnnnnnnnnnnnnnnnnnnnnnnnnnnnnnnnnnnnnnnnnnnnnnnnnnnnnnnnnnnnnnnnnnnnnnnnnnnnnnnnnnnnnnnnnnnnnnnnnnnnnnnnnnnnnnnnnnnnnnnnnnnnnnnnnnnnnnnnnnnnnnnnnnnnnnnnnnnnnnnnnnnnnnnnnnnnnnnnnnnnnnnnnnnnnnnnnnnnnnnnnnnnnnnnnnnnnnnnnnnnnnnnnnnnnnnnnnnnnnnnnnnnnnnnnnnnnnnnnnnnnnnnnnnnnnnnnnnnnnnnnnnnnnnnnnnnnnnnnnnnnnnnnnnnnnnnnnnnnnnnnnnnnnnnnnnnnnnnnnnnnnnnnnnnnnnnnnnnnnnnnnnnnnnnnnnnnnnnnnnnnnnnnnnnnnnnnnnnnnnnnnnnnnnnnnnnnnnnnnnnnnnnnnnnnnnnnnnnnnnnnnnnnnnnnnnnnnnnnnnnnnnnnnnnnnnnnnnnnnnnnnnnnnnnnnnnnnnnnnnnnnnnnnnnnnnnnnnnnnnnnnnnnnnnnnnnnnnnnnnnnnnnnnnnnnnnnnnnnnnnnnnnnnnnnnnnnnnnnnnnnnnnnnnnnnnnnnnnnnnnnnnnnnnnnnnnnnnnnnnnnnnnnnnnnnnnnnnnnnnnnnnnnnnnnnnnnnnnnnnnnnnnnnnnnnnnnnnnnnnnnnnnnnnnnnnnnnnnnnnnnnnnnnnnnnnnnnnnnnnnnnnnnnnnnnnnnnnnnnnnnnnnnnnnnnnnnnnnnnnnnnnnnnnnnnnnnnnnnnnnnnnnnnnnnnnnnnnnnnnnnnnnnnnnnnnnnnnnnnnnnnnnnnnnnnnnnnnnnnnnnnnnnnnnnnnnnnnnnnnnnnnnnnnnnnnnnnnnnnnnnnnnnnnnnnnnnnnnnnnnnnnnnnnnnnnnnnnnnnnnnnnnnnnnnnnnnnnnnnnnnnnnnnnnnnnnnnnnnnnnnnnnnnnnnnnnnnnnnnnnnnnnnnnnnnnnnnnnnnnnnnnnnnnnnnnnnnnnnnnnnnnnnnnnnnnnnnnnnnnnnnnnnnnnnnnnnnnnnnnnnnnnnnnnnnnnnnnnnnnnnnnnnnnnnnnnnnnnnnnnnnnnnnnnnnnnnnnnnnnnnnnnnnnnnnnnnnnnnnnnnnnnnnnnnnnnnnnnnnnnnnnnnnnnnnnnnnnnnnnnnnnnnnnnnnnnnnnnnnnnnnnnnnnnnnnnnnnnnnnnnnnnnnnnnnnnnnnnnnnnnnnnnnnnnnnnnnnnnnnnnnnnnnnnnnnnnnnnnnnnnnnnnnnnnnnnnnnnnnnnnnnnnnnnnnnnnnnnnnnnnnnnnnnnnnnnnnnnnnnnnnnnnnnnnnnnnnnnnnnnnnnnnnnnnnnnnnnnnnnnnnnnnnnnnnnnnnnnnnnnnnnnnnnnnnnnnnnnnnnnnnnnnnnnnnnnnnnnnnnnnnnnnnnnnnnnnnnnnnnnnnnnnnnnnnnnnnnnnnnnnnnnnnnnnnnnnnnnnnnnnnnnnnnnnnnnnnnnnnnnnnnnnnnnnnnnnnnnnnnnnnnnnnnnnnnnnnnnnnnnnnnnnnnnnnnnnnnnnnnnnnnnnnnnnnnnnnnnnnnnnnnnnnnnnnnnnnnnnnnnnnnnnnnnnnnnnnnnnnnnnnnnnnnnnnnnnnnnnnnnnnnnnnnnnnnnnnnnnnnnnnnnnnnnnnnnnnnnnnnnnnnnnnnnnnnnnnnnnnnnnnnnnnnnnnnnnnnnnnnnnnnnnnnnnnnnnnnnnnnnnnnnnnnnnnnnnnnnnnnnnnnnnnnnnnnnnnnnnnnnnnnnnnnnnnnnnnnnnnnnnnnnnnnnnnnnnnnnnnnnnnnnnnnnnnnnnnnnnnnnnnnnnnnnnnnnnnnnnnnnnnnnnnnnnnnnnnnnnnnnnnnnnnnnnnnnnnnnnnnnnnnnnnnnnnnnnnnnnnnnnnnnnnnnnnnnnnnnnnnnnnnnnnnnnnnnnnnnnnnnnnnnnnnnnnnnnnnnnnnnnnnnnnnnnnnnnnnnnnnnnnnnnnnnnnnnnnnnnnnnnnnnnnnnnnnnnnnnnnnnnnnnnnnnnnnnnnnnnnnnnnnnnnnnnnnnnnnnnnnnnnnnnnnnnnnnnnnnnnnnnnnnnnnnnnnnnnnnnnnnnnnnnnnnnnnnnnnnnnnnnnnnnnnnnnnnnnnnnnnnnnnnnnnnnnnnnnnnnnnnnnnnnnnnnnnnnnnnnnnnnnnnnnnnnnnnnnnnnnnnnnnnnnnnnnnnnnnnnnnnnnnnnnnnnnnnnnnnnnnnnnnnnnnnnnnnnnnnnnnnnnnnnnnnnnnnnnnnnnnnnnnnnnnnnnnnnnnnnnnnnnnnnnnnnnnnnnnnnnnnnnnnnnnnnnnnnnnnnnnnnnnnnnnnnnnnnnnnnnnnnnnnnnnnnnnnnnnnnnnnnnnnnnnnnnnnnnnnnnnnnnnnnnnnnnnnnnnnnnnnnnnnnnnnnnnnnnnnnnnnnnnnnnnnnnnnnnnnnnnnnnnnnnnnnnnnnnnnnnnnnnnnnnnnnnnnnnnnnnnnnnnnnnnnnnnnnnnnnnnnnnnnnnnnnnnnnnnnnnnnnnnnnnnnnnnnnnnnnnnnnnnnnnnnnnnnnnnnnnnnnnnnnnnnnnnnnnnnnnnnnnnnnnnnnnnnnnnnnnnnnnnnnnnnnnnnnnnnnnnnnnnnnnnnnnnnnnnnnnnnnnnnnnnnnnnnnnnnnnnnnnnnnnnnnnnnnnnnnnnnnnnnnnnnnnnnnnnnnnnnnnnnnnnnnnnnnnnnnnnnnnnnnnnnnnnnnnnnnnnnnnnnnnnnnnnnnnnnnnnnnnnnnnnnnnnnnnnnnnnnnnnnnnnnnnnnnnnnnnnnnnnnnnnnnnnnnnnnnnnnnnnnnnnnnnnnnnnnnnnnnnnnnnnnnnnnnnnnnnnnnnnnnnnnnnnnnnnnnnnnnnnnnnnnnnnnnnnnnnnnnnnnnnnnnnnnnnnnnnnnnnnnnnnnnnnnnnnnnnnnnnnnnnnnnnnnnnnnnnnnnnnnnnnnnnnnnnnnnnnnnnnnnnnnnnnnnnnnnnnnnnnnnnnnnnnnnnnnnnnnnnnnnnnnnnnnnnnnnnnnnnnnnnnnnnnnnnnnnnnnnnnnnnnnnnnnnnnnnnnnnnnnnnnnnnnnnnnnnnnnnnnnnnnnnnnnnnnnnnnnnnnnnnnnnnnnnnnnnnnnnnnnnnnnnnnnnnnnnnnnnnnnnnnnnnnnnnnnnnnnnnnnnnnnnnnnnnnnnnnnnnnnnnnnnnnnnnnnnnnnnnnnnnnnnnnnnnnnnnnnnnnnnnnnnnnnnnnnnnnnnnnnnnnnnnnnnnnnnnnnnnnnnnnnnnnnnnnnnnnnnnnnnnnnnnnnnnnnnnnnnnnnnnnnnnnnnnnnnnnnnnnnnnnnnnnnnnnnnnnnnnnnnnnnnnnnnnnnnnnnnnnnnnnnnnnnnnnnnnnnnnnnnnnnnnnnnnnnnnnnnnnnnnnnnnnnnnnnnnnnnnnnnnnnnnnnnnnnnnnnnnnnnnnnnnnnnnnnnnnnnnnnnnnnnnnnnnnnnnnnnnnnnnnnnnnnnnnnnnnnnnnnnnnnnnnnnnnnnnnnnnnnnnnnnnnnnnnnnnnnnnnnnnnnnnnnnnnnnnnnnnnnnnnnnnnnnnnnnnnnnnnnnnnnnnnnnnnnnnnnnnnnnnnnnnnnnnnnnnnnnnnnnnnnnnnnnnnnnnnnnnnnnnnnnnnnnnnnnnnnnnnnnnnnnnnnnnnnnnnnnnnnnnnnnnnnnnnnnnnnnnnnnnnnnnnnnnnnnnnnnnnnnnnnnnnnnnnnnnnnnnnnnnnnnnnnnnnnnnnnnnnnnnnnnnnnnnnnnnnnnnnnnnnnnnnnnnnnnnnnnnnnnnnnnnnnnnnnnnnnnnnnnnnnnnnnnnnnnnnnnnnnnnnnnnnnnnnnnnnnnnnnnnnnnnnnnnnnnnnnnnnnnnnnnnnnnnnnnnnnnnnnnnnnnnnnnnnnnnnnnnnnnnnnnnnnnnnnnnnnnnnnnnnnnnnnnnnnnnnnnnnnnnnnnnnnnnnnnnnnnnnnnnnnnnnnnnnnnnnnnnnnnnnnnnnnnnnnnnnnnnnnnnnnnnnnnnnnnnnnnnnnnnnnnnnnnnnnnnnnnnnnnnnnnnnnnnnnnnnnnnnnnnnnnnnnnnnnnnnnnnnnnnnnnnnnnnnnnnnnnnnnnnnnnnnnnnnnnnnnnnnnnnnnnnnnnnnnnnnnnnnnnnnnnnnnnnnnnnnnnnnnnnnnnnnnnnnnnnnnnnnnnnnnnnnnnnnnnnnnnnnnnnnnnnnnnnnnnnnnnnnnnnnnnnnnnnnnnnnnnnnnnnnnnnnnnnnnnnnnnnnnnnnnnnnnnnnnnnnnnnnnnnnnnnnnnnnnnnnnnnnnnnnnnnnnnnnnnnnnnnnnnnnnnnnnnnnnnnnnnnnnnnnnnnnnnnnnnnnnnnnnnnnnnnnnnnnnnnnnnnnnnnnnnnnnnnnnnnnnnnnnnnnnnnnnnnnnnnnnnnnnnnnnnnnnnnnnnnnnnnnnnnnnnnnnnnnnnnnnnnnnnnnnnnnnnnnnnnnnnnnnnnnnnnnnnnnnnnnnnnnnnnnnnnnnnnnnnnnnnnnnnnnnnnnnnnnnnnnnnnnnnnnnnnnnnnnnnnnnnnnnnnnnnnnnnnnnnnnnnnnnnnnnnnnnnnnnnnnnnnnnnnnnnnnnnnnnnnnnnnnnnnnnnnnnnnnnnnnnnnnnnnnnnnnnnnnnnnnnnnnnnnnnnnnnnnnnnnnnnnnnnnnnnnnnnnnnnnnnnnnnnnnnnnnnnnnnnnnnnnnnnnnnnnnnnnnnnnnnnnnnnnnnnnnnnnnnnnnnnnnnnnnnnnnnnnnnnnnnnnnnnnnnnnnnnnnnnnnnnnnnnnnnnnnnnnnnnnnnnnnnnnnnnnnnnnnnnnnnnnnnnnnnnnnnnnnnnnnnnnnnnnnnnnnnnnnnnnnnnnnnnnnnnnnnnnnnnnnnnnnnnnnnnnnnnnnnnnnnnnnnnnnnnnnnnnnnnnnnnnnnnnnnnnnnnnnnnnnnnnnnnnnnnnnnnnnnnnnnnnnnnnnnnnnnnnnnnnnnnnnnnnnnnnnnnnnnnnnnnnnnnnnnnnnnnnnnnnnnnnnnnnnnnnnnnnnnnnnnnnnnnnnnnnnnnnnnnnnnnnnnnnnnnnnnnnnnnnnnnnnnnnnnnnnnnnnnnnnnnnnnnnnnnnnnnnnnnnnnnnnnnnnnnnnnnnnnnnnnnnnnnnnnnnnnnnnnnnnnnnnnnnnnnnnnnnnnnnnnnnnnnnnnnnnnnnnnnnnnnnnnnnnnnnnnnnnnnnnnnnnnnnnnnnnnnnnnnnnnnnnnnnnnnnnnnnnnnnnnnnnnnnnnnnnnnnnnnnnnnnnnnnnnnnnnnnnnnnnnnnnnnnnnnnnnnnnnnnnnnnnnnnnnnnnnnnnnnnnnnnnnnnnnnnnnnnnnnnnnnnnnnnnnnnnnnnnnnnnnnnnnnnnnnnnnnnnnnnnnnnnnnnnnnnnnnnnnnnnnnnnnnnnnnnnnnnnnnnnnnnnnnnnnnnnnnnnnnnnnnnnnnnnnnnnnnnnnnnnnnnnnnnnnnnnnnnnnnnnnnnnnnnnnnnnnnnnnnnnnnnnnnnnnnnnnnnnnnnnnnnnnnnnnnnnnnnnnnnnnnnnnnnnnnnnnnnnnnnnnnnnnnnnnnnnnnnnnnnnnnnnnnnnnnnnnnnnnnnnnnnnnnnnnnnnnnnnnnnnnnnnnnnnnnnnnnnnnnnnnnnnnnnnnnnnnnnnnnnnnnnnnnnnnnnnnnnnnnnnnnnnnnnnnnnnnnnnnnnnnnnnnnnnnnnnnnnnnnnnnnnnnnnnnnnnnnnnnnnnnnnnnnnnnnnnnnnnnnnnnnnnnnnnnnnnnnnnnnnnnnnnnnnnnnnnnnnnnnnnnnnnnnnnnnnnnnnnnnnnnnnnnnnnnnnnnnnnnnnnnnnnnnnnnnnnnnnnnnnnnnnnnnnnnnnnnnnnnnnnnnnnnnnnnnnnnnnnnnnnnnnnnnnnnnnnnnnnnnnnnnnnnnnnnnnnnnnnnnnnnnnnnnnnnnnnnnnnnnnnnnnnnnnnnnnnnnnnnnnnnnnnnnnnnnnnnnnnnnnnnnnnnnnnnnnnnnnnnnnnnnnnnnnnnnnnnnnnnnnnnnnnnnnnnnnnnnnnnnnnnnnnnnnnnnnnnnnnnnnnnnnnnnnnnnnnnnnnnnnnnnnnnnnnnnnnnnnnnnnnnnnnnnnnnnnnnnnnnnnnnnnnnnnnnnnnnnnnnnnnnnnnnnnnnnnnnnnnnnnnnnnnnnnnnnnnnnnnnnnnnnnnnnnnnnnnnnnnnnnnnnnnnnnnnnnnnnnnnnnnnnnnnnnnnnnnnnnnnnnnnnnnnnnnnnnnnnnnnnnnnnnnnnnnnnnnnnnnnnnnnnnnnnnnnnnnnnnnnnnnnnnnnnnnnnnnnnnnnnnnnnnnnnnnnnnnnnnnnnnnnnnnnnnnnnnnnnnnnnnnnnnnnnnnnnnnnnnnnnnnnnnnnnnnnnnnnnnnnnnnnnnnnnnnnnnnnnnnnnnnnnnnnnnnnnnnnnnnnnnnnnnnnnnnnnnnnnnnnnnnnnnnnnnnnnnnnnnnnnnnnnnnnnnnnnnnnnnnnnnnnnnnnnnnnnnnnnnnnnnnnnnnnnnnnnnnnnnnnnnnnnnnnnnnnnnnnnnnnnnnnnnnnnnnnnnnnnnnnnnnnnnnnnnnnnnnnnnnnnnnnnnnnnnnnnnnnnnnnnnnnnnnnnnnnnnnnnnnnnnnnnnnnnnnnnnnnnnnnnnnnnnnnnnnnnnnnnnnnnnnnnnnnnnnnnnnnnnnnnnnnnnnnnnnnnnnnnnnnnnnnnnnnnnnnnnnnnnnnnnnnnnnnnnnnnnnnnnnnnnnnnnnnnnnnnnnnnnnnnnnnnnnnnnnnnnnnnnnnnnnnnnnnnnnnnnnnnnnnnnnnnnnnnnnnnnnnnnnnnnnnnnnnnnnnnnnnnnnnnnnnnnnnnnnnnnnnnnnnnnnnnnnnnnnnnnnnnnnnnnnnnnnnnnnnnnnnnnnnnnnnnnnnnnnnnnnnnnnnnnnnnnnnnnnnnnnnnnnnnnnnnnnnnnnnnnnnnnnnnnnnnnnnnnnnnnnnnnnnnnnnnnnnnnnnnnnnnnnnnnnnnnnnnnnnnnnnnnnnnnnnnnnnnnnnnnnnnnnnnnnnnnnnnnnnnnnnnnnnnnnnnnnnnnnnnnnnnnnnnnnnnnnnnnnnnnnnnnnnnnnnnnnnnnnnnnnnnnnnnnnnnnnnnnnnnnnnnnnnnnnnnnnnnnnnnnnnnnnnnnnnnnnnnnnnnnnnnnnnnnnnnnnnnnnnnnnnnnnnnnnnnnnnnnnnnnnnnnnnnnnnnnnnnnnnnnnnnnnnnnnnnnnnnnnnnnnnnnnnnnnnnnnnnnnnnnnnnnnnnnnnnnnnnnnnnnnnnnnnnnnnnnnnnnnnnnnnnnnnnnnnnnnnnnnnnnnnnnnnnnnnnnnnnnnnnnnnnnnnnnnnnnnnnnnnnnnnnnnnnnnnnnnnnnnnnnnnnnnnnnnnnnnnnnnnnnnnnnnnnnnnnnnnnnnnnnnnnnnnnnnnnnnnnnnnnnnnnnnnnnnnnnnnnnnnnnnnnnnnnnnnnnnnnnnnnnnnnnnnnnnnnnnnnnnnnnnnnnnnnnnnnnnnnnnnnnnnnnnnnnnnnnnnnnnnnnnnnnnnnnnnnnnnnnnnnnnnnnnnnnnnnnnnnnnnnnnnnnnnnnnnnnnnnnnnnnnnnnnnnnnnnnnnnnnnnnnnnnnnnnnnnnnnnnnnnnnnnnnnnnnnnnnnnnnnnnnnnnnnnnnnnnnnnnnnnnnnnnnnnnnnnnnnnnnnnnnnnnnnnnnnnnnnnnnnnnnnnnnnnnnnnnnnnnnnnnnnnnnnnnnnnnnnnnnnnnnnnnnnnnnnnnnnnnnnnnnnnnnnnnnnnnnnnnnnnnnnnnnnnnnnnnnnnnnnnnnnnnnnnnnnnnnnnnnnnnnnnnnnnnnnnnnnnnnnnnnnnnnnnnnnnnnnnnnnnnnnnnnnnnnnnnnnnnnnnnnnnnnnnnnnnnnnnnnnnnnnnnnnnnnnnnnnnnnnnnnnnnnnnnnnnnnnnnnnnnnnnnnnnnnnnnnnnnnnnnnnnnnnnnnnnnnnnnnnnnnnnnnnnnnnnnnnnnnnnnnnnnnnnnnnnnnnnnnnnnnnnnnnnnnnnnnnnnnnnnnnnnnnnnnnnnnnnnnnnnnnnnnnnnnnnnnnnnnnnnnnnnnnnnnnnnnnnnnnnnnnnnnnnnnnnnnnnnnnnnnnnnnnnnnnnnnnnnnnnnnnnnnnnnnnnnnnnnnnnnnnnnnnnnnnnnnnnnnnnnnnnnnnnnnnnnnnnnnnnnnnnnnnnnnnnnnnnnnnnnnnnnnnnnnnnnnnnnnnnnnnnnnnnnnnnnnnnnnnnnnnnnnnnnnnnnnnnnnnnnnnnnnnnnnnnnnnnnnnnnnnnnnnnnnnnnnnnnnnnnnnnnnnnnnnnnnnnnnnnnnnnnnnnnnnnnnnnnnnnnnnnnnnnnnnnnnnnnnnnnnnnnnnnnnnnnnnnnnnnnnnnnnnnnnnnnnnnnnnnnnnnnnnnnnnnnnnnnnnnnnnnnnnnnnnnnnnnnnnnnnnnnnnnnnnnnnnnnnnnnnnnnnnnnnnnnnnnnnnnnnnnnnnnnnnnnnnnnnnnnnnnnnnnnnnnnnnnnnnnnnnnnnnnnnnnnnnnnnnnnnnnnnnnnnnnnnnnnnnnnnnnnnnnnnnnnnnnnnnnnnnnnnnnnnnnnnnnnnnnnnnnnnnnnnnnnnnnnnnnnnnnnnnnnnnnnnnnnnnnnnnnnnnnnnnnnnnnnnnnnnnnnnnnnnnnnnnnnnnnnnnnnnnnnnnnnnnnnnnnnnnnnnnnnnnnnnnnnnnnnnnnnnnnnnnnnnnnnnnnnnnnnnnnnnnnnnnnnnnnnnnnnnnnnnnnnnnnnnnnnnnnnnnnnnnnnnnnnnnnnnnnnnnnnnnnnnnnnnnnnnnnnnnnnnnnnnnnnnnnnnnnnnnnnnnnnnnnnnnnnnnnnnnnnnnnnnnnnnnnnnnnnnnnnnnnnnnnnnnnnnnnnnnnnnnnnnnnnnnnnnnnnnnnnnnnnnnnnnnnnnnnnnnnnnnnnnnnnnnnnnnnnnnnnnnnnnnnnnnnnnnnnnnnnnnnnnnnnnnnnnnnnnnnnnnnnnnnnnnnnnnnnnnnnnnnnnnnnnnnnnnnnnnnnnnnnnnnnnnnnnnnnnnnnnnnnnnnnnnnnnnnnnnnnnnnnnnnnnnnnnnnnnnnnnnnnnnnnnnnnnnnnnnnnnnnnnnnnnnnnnnnnnnnnnnnnnnnnnnnnnnnnnnnnnnnnnnnnnnnnnnnnnnnnnnnnnnnnnnnnnnnnnnnnnnnnnnnnnnnnnnnnnnnnnnnnnnnnnnnnnnnnnnnnnnnnnnnnnnnnnnnnnnnnnnnnnnnnnnnnnnnnnnnnnnnnnnnnnnnnnnnnnnnnnnnnnnnnnnnnnnnnnnnnnnnnnnnnnnnnnnnnnnnnnnnnnnnnnnnnnnnnnnnnnnnnnnnnnnnnnnnnnnnnnnnnnnnnnnnnnnnnnnnnnnnnnnnnnnnnnnnnnnnnnnnnnnnnnnnnnnnnnnnnnnnnnnnnnnnnnnnnnnnnnnnnnnnnnnnnnnnnnnnnnnnnnnnnnnnnnnnnnnnnnnnnnnnnnnnnnnnnnnnnnnnnnnnnnnnnnnnnnnnnnnnnnnnnnnnnnnnnnnnnnnnnnnnnnnnnnnnnnnnnnnnnnnnnnnnnnnnnnnnnnnnnnnnnnnnnnnnnnnnnnnnnnnnnnnnnnnnnnnnnnnnnnnnnnnnnnnnnnnnnnnnnnnnnnnnnnnnnnnnnnnnnnnnnnnnnnnnnnnnnnnnnnnnnnnnnnnnnnnnnnnnnnnnnnnnnnnnnnnnnnnnnnnnnnnnnnnnnnnnnnnnnnnnnnnnnnnnnnnnnnnnnnnnnnnnnnnnnnnnnnnnnnnnnnnnnnnnnnnnnnnnnnnnnnnnnnnnnnnnnnnnnnnnnnnnnnnnnnnnnnnnnnnnnnnnnnnnnnnnnnnnnnnnnnnnnnnnnnnnnnnnnnnnnnnnnnnnnnnnnnnnnnnnnnnnnnnnnnnnnnnnnnnnnnnnnnnnnnnnnnnnnnnnnnnnnnnnnnnnnnnnnnnnnnnnnnnnnnnnnnnnnnnnnnnnnnnnnnnnnnnnnnnnnnnnnnnnnnnnnnnnnnnnnnnnnnnnnnnnnnnnnnnnnnnnnnnnnnnnnnnnnnnnnnnnnnnnnnnnnnnnnnnnnnnnnnnnnnnnnnnnnnnnnnnnnnnnnnnnnnnnnnnnnnnnnnnnnnnnnnnnnnnnnnnnnnnnnnnnnnnnnnnnnnnnnnnnnnnnnnnnnnnnnnnnnnnnnnnnnnnnnnnnnnnnnnnnnnnnnnnnnnnnnnnnnnnnnnnnnnnnnnnnnnnnnnnnnnnnnnnnnnnnnnnnnnnnnnnnnnnnnnnnnnnnnnnnnnnnnnnnnnnnnnnnnnnnnnnnnnnnnnnnnnnnnnnnnnnnnnnnnnnnnnnnnnnnnnnnnnnnnnnnnnnnnnnnnnnnnnnnnnnnnnnnnnnnnnnnnnnnnnnnnnnnnnnnnnnnnnnnnnnnnnnnnnnnnnnnnnnnnnnnnnnnnnnnnnnnnnnnnnnnnnnnnnnnnnnnnnnnnnnnnnnnnnnnnnnnnnnnnnnnnnnnnnnnnnnnnnnnnnnnnnnnnnnnnnnnnnnnnnnnnnnnnnnnnnnnnnnnnnnnnnnnnnnnnnnnnnnnnnnnnnnnnnnnnnnnnnnnnnnnnnnnnnnnnnnnnnnnnnnnnnnnnnnnnnnnnnnnnnnnnnnnnnnnnnnnnnnnnnnnnnnnnnnnnnnnnnnnnnnnnnnnnnnnnnnnnnnnnnnnnnnnnnnnnnnnnnnnnnnnnnnnnnnnnnnnnnnnnnnnnnnnnnnnnnnnnnnnnnnnnnnnnnnnnnnnnnnnnnnnnnnnnnnnnnnnnnnnnnnnnnnnnnnnnnnnnnnnnnnnnnnnnnnnnnnnnnnnnnnnnnnnnnnnnnnnnnnnnnnnnnnnnnnnnnnnnnnnnnnnnnnnnnnnnnnnnnnnnnnnnnnnnnnnnnnnnnnnnnnnnnnnnnnnnnnnnnnnnnnnnnnnnnnnnnnnnnnnnnnnnnnnnnnnnnnnnnnnnnnnnnnnnnnnnnnnnnnnnnnnnnnnnnnnnnnnnnnnnnnnnnnnnnnnnnnnnnnnnnnnnnnnnnnnnnnnnnnnnnnnnnnnnnnnnnnnnnnnnnnnnnnnnnnnnnnnnnnnnnnnnnnnnnnnnnnnnnnnnnnnnnnnnnnnnnnnnnnnnnnnnnnnnnnnnnnnnnnnnnnnnnnnnnnnnnnnnnnnnnnnnnnnnnnnnnnnnnnnnnnnnnnnnnnnnnnnnnnnnnnnnnnnnnnnnnnnnnnnnnnnnnnnnnnnnnnnnnnnnnnnnnnnnnnnnnnnnnnnnnnnnnnnnnnnnnnnnnnnnnnnnnnnnnnnnnnnnnnnnnnnnnnnnnnnnnnnnnnnnnnnnnnnnnnnnnnnnnnnnnnnnnnnnnnnnnnnnnnnnnnnnnnnnnnnnnnnnnnnnnnnnnnnnnnnnnnnnnnnnnnnnnnnnnnnnnnnnnnnnnnnnnnnnnnnnnnnnnnnnnnnnnnnnnnnnnnnnnnnnnnnnnnnnnnnnnnnnnnnnnnnnnnnnnnnnnnnnnnnnnnnnnnnnnnnnnnnnnnnnnnnnnnnnnnnnnnnnnnnnnnnnnnnnnnnnnnnnnnnnnnnnnnnnnnnnnnnnnnnnnnnnnnnnnnnnnnnnnnnnnnnnnnnnnnnnnnnnnnnnnnnnnnnnnnnnnnnnnnnnnnnnnnnnnnnnnnnnnnnnnnnnnnnnnnnnnnnnnnnnnnnnnnnnnnnnnnnnnnnnnnnnnnnnnnnnnnnnnnnnnnnnnnnnnnnnnnnnnnnnnnnnnnnnnnnnnnnnnnnnnnnnnnnnnnnnnnnnnnnnnnnnnnnnnnnnnnnnnnnnnnnnnnnnnnnnnnnnnnnnnnnnnnnnnnnnnnnnnnnnnnnnnnnnnnnnnnnnnnnnnnnnnnnnnnnnnnnnnnnnnnnnnnnnnnnnnnnnnnnnnnnnnnnnnnnnnnnnnnnnnnnnnnnnnnnnnnnnnnnnnnnnnnnnnnnnnnnnnnnnnnnnnnnnnnnnnnnnnnnnnnnnnnnnnnnnnnnnnnnnnnnnnnnnnnnnnnnnnnnnnnnnnnnnnnnnnnnnnnnnnnnnnnnnnnnnnnnnnnnnnnnnnnnnnnnnnnnnnnnnnnnnnnnnnnnnnnnnnnnnnnnnnnnnnnnnnnnnnnnnnnnnnnnnnnnnnnnnnnnnnnnnnnnnnnnnnnnnnnnnnnnnnnnnnnnnnnnnnnnnnnnnnnnnnnnnnnnnnnnnnnnnnnnnnnnnnnnnnnnnnnnnnnnnnnnnnnnnnnnnnnnnnnnnnnnnnnnnnnnnnnnnnnnnnnnnnnnnnnnnnnnnnnnnnnnnnnnnnnnnnnnnnnnnnnnnnnnnnnnnnnnnnnnnnnnnnnnnnnnnnnnnnnnnnnnnnnnnnnnnnnnnnnnnnnnnnnnnnnnnnnnnnnnnnnnnnnnnnnnnnnnnnnnnnnnnnnnnnnnnnnnnnnnnnnnnnnnnnnnnnnnnnnnnnnnnnnnnnnnnnnnnnnnnnnnnnnnnnnnnnnnnnnnnnnnnnnnnnnnnnnnnnnnnnnnnnnnnnnnnnnnnnnnnnnnnnnnnnnnnnnnnnnnnnnnnnnnnnnnnnnnnnnnnnnnnnnnnnnnnnnnnnnnnnnnnnnnnnnnnnnnnnnnnnnnnnnnnnnnnnnnnnnnnnnnnnnnnnnnnnnnnnnnnnnnnnnnnnnnnnnnnnnnnnnnnnnnnnnnnnnnnnnnnnnnnnnnnnnnnnnnnnnnnnnnnnnnnnnnnnnnnnnnnnnnnnnnnnnnnnnnnnnnnnnnnnnnnnnnnnnnnnnnnnnnnnnnnnnnnnnnnnnnnnnnnnnnnnnnnnnnnnnnnnnnnnnnnnnnnnnnnnnnnnnnnnnnnnnnnnnnnnnnnnnnnnnnnnnnnnnnnnnnnnnnnnnnnnnnnnnnnnnnnnnnnnnnnnnnnnnnnnnnnnnnnnnnnnnnnnnnnnnnnnnnnnnnnnnnnnnnnnnnnnnnnnnnnnnnnnnnnnnnnnnnnnnnnnnnnnnnnnnnnnnnnnnnnnnnnnnnnnnnnnnnnnnnnnnnnnnnnnnnnnnnnnnnnnnnnnnnnnnnnnnnnnnnnnnnnnnnnnnnnnnnnnnnnnnnnnnnnnnnnnnnnnnnnnnnnnnnnnnnnnnnnnnnnnnnnnnnnnnnnnnnnnnnnnnnnnnnnnnnnnnnnnnnnnnnnnnnnnnnnnnnnnnnnnnnnnnnnnnnnnnnnnnnnnnnnnnnnnnnnnnnnnnnnnnnnnnnnnnnnnnnnnnnnnnnnnnnnnnnnnnnnnnnnnnnnnnnnnnnnnnnnnnnnnnnnnnnnnnnnnnnnnnnnnnnnnnnnnnnnnnnnnnnnnnnnnnnnnnnnnnnnnnnnnnnnnnnnnnnnnnnnnnnnnnnnnnnnnnnnnnnnnnnnnnnnnnnnnnnnnnnnnnnnnnnnnnnnnnnnnnnnnnnnnnnnnnnnnnnnnnnnnnnnnnnnnnnnnnnnnnnnnnnnnnnnnnnnnnnnnnnnnnnnnnnnnnnnnnnnnnnnnnnnnnnnnnnnnnnnnnnnnnnnnnnnnnnnnnnnnnnnnnnnnnnnnnnnnnnnnnnnnnnnnnnnnnnnnnnnnnnnnnnnnnnnnnnnnnnnnnnnnnnnnnnnnnnnnnnnnnnnnnnnnnnnnnnnnnnnnnnnnnnnnnnnnnnnnnnnnnnnnnnnnnnnnnnnnnnnnnnnnnnnnnnnnnnnnnnnnnnnnnnnnnnnnnnnnnnnnnnnnnnnnnnnnnnnnnnnnnnnnnnnnnnnnnnnnnnnnnnnnnnnnnnnnnnnnnnnnnnnnnnnnnnnnnnnnnnnnnnnnnnnnnnnnnnnnnnnnnnnnnnnnnnnnnnnnnnnnnnnnnnnnnnnnnnnnnnnnnnnnnnnnnnnnnnnnnnnnnnnnnnnnnnnnnnnnnnnnnnnnnnnnnnnnnnnnnnnnnnnnnnnnnnnnnnnnnnnnnnnnnnnnnnnnnnnnnnnnnnnnnnnnnnnnnnnnnnnnnnnnnnnnnnnnnnnnnnnnnnnnnnnnnnnnnnnnnnnnnnnnnnnnnnnnnnnnnnnnnnnnnnnnnnnnnnnnnnnnnnnnnnnnnnnnnnnnnnnnnnnnnnnnnnnnnnnnnnnnnnnnnnnnnnnnnnnnnnnnnnnnnnnnnnnnnnnnnnnnnnnnnnnnnnnnnnnnnnnnnnnnnnnnnnnnnnnnnnnnnnnnnnnnnnnnnnnnnnnnnnnnnnnnnnnnnnnnnnnnnnnnnnnnnnnnnnnnnnnnnnnnnnnnnnnnnnnnnnnnnnnnnnnnnnnnnnnnnnnnnnnnnnnnnnnnnnnnnnnnnnnnnnnnnnnnnnnnnnnnnnnnnnnnnnnnnnnnnnnnnnnnnnnnnnnnnnnnnnnnnnnnnnnnnnnnnnnnnnnnnnnnnnnnnnnnnnnnnnnnnnnnnnnnnnnnnnnnnnnnnnnnnnnnnnnnnnnnnnnnnnnnnnnnnnnnnnnnnnnnnnnnnnnnnnnnnnnnnnnnnnnnnnnnnnnnnnnnnnnnnnnnnnnnnnnnnnnnnnnnnnnnnnnnnnnnnnnnnnnnnnnnnnnnnnnnnnnnnnnnnnnnnnnnnnnnnnnnnnnnnnnnnnnnnnnnnnnnnnnnnnnnnnnnnnnnnnnnnnnnnnnnnnnnnnnnnnnnnnnnnnnnnnnnnnnnnnnnnnnnnnnnnnnnnnnnnnnnnnnnnnnnnnnnnnnnnnnnnnnnnnnnnnnnnnnnnnnnnnnnnnnnnnnnnnnnnnnnnnnnnnnnnnnnnnnnnnnnnnnnnnnnnnnnnnnnnnnnnnnnnnnnnnnnnnnnnnnnnnnnnnnnnnnnnnnnnnnnnnnnnnnnnnnnnnnnnnnnnnnnnnnnnnnnnnnnnnnnnnnnnnnnnnnnnnnnnnnnnnnnnnnnnnnnnnnnnnnnnnnnnnnnnnnnnnnnnnnnnnnnnnnnnnnnnnnnnnnnnnnnnnnnnnnnnnnnnnnnnnnnnnnnnnnnnnnnnnnnnnnnnnnnnnnnnnnnnnnnnnnnnnnnnnnnnnnnnnnnnnnnnnnnnnnnnnnnnnnnnnnnnnnnnnnnnnnnnnnnnnnnnnnnnnnnnnnnnnnnnnnnnnnnnnnnnnnnnnnnnnnnnnnnnnnnnnnnnnnnnnnnnnnnnnnnnnnnnnnnnnnnnnnnnnnnnnnnnnnnnnnnnnnnnnnnnnnnnnnnnnnnnnnnnnnnnnnnnnnnnnnnnnnnnnnnnnnnnnnnnnnnnnnnnnnnnnnnnnnnnnnnnnnnnnnnnnnnnnnnnnnnnnnnnnnnnnnnnnnnnnnnnnnnnnnnnnnnnnnnnnnnnnnnnnnnnnnnnnnnnnnnnnnnnnnnnnnnnnnnnnnnnnnnnnnnnnnnnnnnnnnnnnnnnnnnnnnnnnnnnnnnnnnnnnnnnnnnnnnnnnnnnnnnnnnnnnnnnnnnnnnnnnnnnnnnnnnnnnnnnnnnnnnnnnnnnnnnnnnnnnnnnnnnnnnnnnnnnnnnnnnnnnnnnnnnnnnnnnnnnnnnnnnnnnnnnnnnnnnnnnnnnnnnnnnnnnnnnnnnnnnnnnnnnnnnnnnnnnnnnnnnnnnnnnnnnnnnnnnnnnnnnnnnnnnnnnnnnnnnnnnnnnnnnnnnnnnnnnnnnnnnnnnnnnnnnnnnnnnnnnnnnnnnnnnnnnnnnnnnnnnnnnnnnnnnnnnnnnnnnnnnnnnnnnnnnnnnnnnnnnnnnnnnnnnnnnnnnnnnnnnnnnnnnnnnnnnnnnnnnnnnnnnnnnnnnnnnnnnnnnnnnnnnnnnnnnnnnnnnnnnnnnnnnnnnnnnnnnnnnnnnnnnnnnnnnnnnnnnnnnnnnnnnnnnnnnnnnnnnnnnnnnnnnnnnnnnnnnnnnnnnnnnnnnnnnnnnnnnnnnnnnnnnnnnnnnnnnnnnnnnnnnnnnnnnnnnnnnnnnnnnnnnnnnnnnnnnnnnnnnnnnnnnnnnnnnnnnnnnnnnnnnnnnnnnnnnnnnnnnnnnnnnnnnnnnnnnnnnnnnnnnnnnnnnnnnnnnnnnnnnnnnnnnnnnnnnnnnnnnnnnnnnnnnnnnnnnnnnnnnnnnnnnnnnnnnnnnnnnnnnnnnnnnnnnnnnnnnnnnnnnnnnnnnnnnnnnnnnnnnnnnnnnnnnnnnnnnnnnnnnnnnnnnnnnnnnnnnnnnnnnnnnnnnnnnnnnnnnnnnnnnnnnnnnnnnnnnnnnnnnnnnnnnnnnnnnnnnnnnnnnnnnnnnnnnnnnnnnnnnnnnnnnnnnnnnnnnnnnnnnnnnnnnnnnnnnnnnnnnnnnnnnnnnnnnnnnnnnnnnnnnnnnnnnnnnnnnnnnnnnnnnnnnnnnnnnnnnnnnnnnnnnnnnnnnnnnnnnnnnnnnnnnnnnnnnnnnnnnnnnnnnnnnnnnnnnnnnnnnnnnnnnnnnnnnnnnnnnnnnnnnnnnnnnnnnnnnnnnnnnnnnnnnnnnnnnnnnnnnnnnnnnnnnnnnnnnnnnnnnnnnnnnnnnnnnnnnnnnnnnnnnnnnnnnnnnnnnnnnnnnnnnnnnnnnnnnnnnnnnnnnnnnnnnnnnnnnnnnnnnnnnnnnnnnnnnnnnnnnnnnnnnnnnnnnnnnnnnnnnnnnnnnnnnnnnnnnnnnnnnnnnnnnnnnnnnnnnnnnnnnnnnnnnnnnnnnnnnnnnnnnnnnnnnnnnnnnnnnnnnnnnnnnnnnnnnnnnnnnnnnnnnnnnnnnnnnnnnnnnnnnnnnnnnnnnnnnnnnnnnnnnnnnnnnnnnnnnnnnnnnnnnnnnnnnnnnnnnnnnnnnnnnnnnnnnnnnnnnnnnnnnnnnnnnnnnnnnnnnnnnnnnnnnnnnnnnnnnnnnnnnnnnnnnnnnnnnnnnnnnnnnnnnnnnnnnnnnnnnnnnnnnnnnnnnnnnnnnnnnnnnnnnnnnnnnnnnnnnnnnnnnnnnnnnnnnnnnnnnnnnnnnnnnnnnnnnnnnnnnnnnnnnnnnnnnnnnnnnnnnnnnnnnnnnnnnnnnnnnnnnnnnnnnnnnnnnnnnnnnnnnnnnnnnnnnnnnnnnnnnnnnnnnnnnnnnnnnnnnnnnnnnnnnnnnnnnnnnnnnnnnnnnnnnnnnnnnnnnnnnnnnnnnnnnnnnnnnnnnnnnnnnnnnnnnnnnnnnnnnnnnnnnnnnnnnnnnnnnnnnnnnnnnnnnnnnnnnnnnnnnnnnnnnnnnnnnnnnnnnnnnnnnnnnnnnnnnnnnnnnnnnnnnnnnnnnnnnnnnnnnnnnnnnnnnnnnnnnnnnnnnnnnnnnnnnnnnnnnnnnnnnnnnnnnnnnnnnnnnnnnnnnnnnnnnnnnnnnnnnnnnnnnnnnnnnnnnnnnnnnnnnnnnnnnnnnnnnnnnnnnnnnnnnnnnnnnnnnnnnnnnnnnnnnnnnnnnnnnnnnnnnnnnnnnnnnnnnnnnnnnnnnnnnnnnnnnnnnnnnnnnnnnnnnnnnnnnnnnnnnnnnnnnnnnnnnnnnnnnnnnnnnnnnnnnnnnnnnnnnnnnnnnnnnnnnnnnnnnnnnnnnnnnnnnnnnnnnnnnnnnnnnnnnnnnnnnnnnnnnnnnnnnnnnnnnnnnnnnnnnnnnnnnnnnnnnnnnnnnnnnnnnnnnnnnnnnnnnnnnnnnnnnnnnnnnnnnnnnnnnnnnnnnnnnnnnnnnnnnnnnnnnnnnnnnnnnnnnnnnnnnnnnnnnnnnnnnnnnnnnnnnnnnnnnnnnnnnnnnnnnnnnnnnnnnnnnnnnnnnnnnnnnnnnnnnnnnnnnnnnnnnnnnnnnnnnnnnnnnnnnnnnnnnnnnnnnnnnnnnnnnnnnnnnnnnnnnnnnnnnnnnnnnnnnnnnnnnnnnnnnnnnnnnnnnnnnnnnnnnnnnnnnnnnnnnnnnnnnnnnnnnnnnnnnnnnnnnnnnnnnnnnnnnnnnnnnnnnnnnnnnnnnnnnnnnnnnnnnnnnnnnnnnnnnnnnnnnnnnnnnnnnnnnnnnnnnnnnnnnnnnnnnnnnnnnnnnnnnnnnnnnnnnnnnnnnnnnnnnnnnnnnnnnnnnnnnnnnnnnnnnnnnnnnnnnnnnnnnnnnnnnnnnnnnnnnnnnnnnnnnnnnnnnnnnnnnnnnnnnnnnnnnnnnnnnnnnnnnnnnnnnnnnnnnnnnnnnnnnnnnnnnnnnnnnnnnnnnnnnnnnnnnnnnnnnnnnnnnnnnnnnnnnnnnnnnnnnnnnnnnnnnnnnnnnnnnnnnnnnnnnnnnnnnnnnnnnnnnnnnnnnnnnnnnnnnnnnnnnnnnnnnnnnnnnnnnnnnnnnnnnnnnnnnnnnnnnnnnnnnnnnnnnnnnnnnnnnnnnnnnnnnnnnnnnnnnnnnnnnnnnnnnnnnnnnnnnnnnnnnnnnnnnnnnnnnnnnnnnnnnnnnnnnnnnnnnnnnnnnnnnnnnnnnnnnnnnnnnnnnnnnnnnnnnnnnnnnnnnnnnnnnnnnnnnnnnnnnnnnnnnnnnnnnnnnnnnnnnnnnnnnnnnnnnnnnnnnnnnnnnnnnnnnnnnnnnnnnnnnnnnnnnnnnnnnnnnnnnnnnnnnnnnnnnnnnnnnnnnnnnnnnnnnnnnnnnnnnnnnnnnnnnnnnnnnnnnnnnnnnnnnnnnnnnnnnnnnnnnnnnnnnnnnnnnnnnnnnnnnnnnnnnnnnnnnnnnnnnnnnnnnnnnnnnnnnnnnnnnnnnnnnnnnnnnnnnnnnnnnnnnnnnnnnnnnnnnnnnnnnnnnnnnnnnnnnnnnnnnnnnnnnnnnnnnnnnnnnnnnnnnnnnnnnnnnnnnnnnnnnnnnnnnnnnnnnnnnnnnnnnnnnnnnnnnnnnnnnnnnnnnnnnnnnnnnnnnnnnnnnnnnnnnnnnnnnnnnnnnnnnnnnnnnnnnnnnnnnnnnnnnnnnnnnnnnnnnnnnnnnnnnnnnnnnnnnnnnnnnnnnnnnnnnnnnnnnnnnnnnnnnnnnnnnnnnnnnnnnnnnnnnnnnnnnnnnnnnnnnnnnnnnnnnnnnnnnnnnnnnnnnnnnnnnnnnnnnnnnnnnnnnnnnnnnnnnnnnnnnnnnnnnnnnnnnnnnnnnnnnnnnnnnnnnnnnnnnnnnnnnnnnnnnnnnnnnnnnnnnnnnnnnnnnnnnnnnnnnnnnnnnnnnnnnnnnnnnnnnnnnnnnnnnnnnnnnnnnnnnnnnnnnnnnnnnnnnnnnnnnnnnnnnnnnnnnnnnnnnnnnnnnnnnnnnnnnnnnnnnnnnnnnnnnnnnnnnnnnnnnnnnnnnnnnnnnnnnnnnnnnnnnnnnnnnnnnnnnnnnnnnnnnnnnnnnnnnnnnnnnnnnnnnnnnnnnnnnnnnnnnnnnnnnnnnnnnnnnnnnnnnnnnnnnnnnnnnnnnnnnnnnnnnnnnnnnnnnnnnnnnnnnnnnnnnnnnnnnnnnnnnnnnnnnnnnnnnnnnnnnnnnnnnnnnnnnnnnnnnnnnnnnnnnnnnnnnnnnnnnnnnnnnnnnnnnnnnnnnnnnnnnnnnnnnnnnnnnnnnnnnnnnnnnnnnnnnnnnnnnnnnnnnnnnnnnnnnnnnnnnnnnnnnnnnnnnnnnnnnnnnnnnnnnnnnnnnnnnnnnnnnnnnnnnnnnnnnnnnnnnnnnnnnnnnnnnnnnnnnnnnnnnnnnnnnnnnnnnnnnnnnnnnnnnnnnnnnnnnnnnnnnnnnnnnnnnnnnnnnnnnnnnnnnnnnnnnnnnnnnnnnnnnnnnnnnnnnnnnnnnnnnnnnnnnnnnnnnnnnnnnnnnnnnnnnnnnnnnnnnnnnnnnnnnnnnnnnnnnnnnnnnnnnnnnnnnnnnnnnnnnnnnnnnnnnnnnnnnnnnnnnnnnnnnnnnnnnnnnnnnnnnnnnnnnnnnnnnnnnnnnnnnnnnnnnnnnnnnnnnnnnnnnnnnnnnnnnnnnnnnnnnnnnnnnnnnnnnnnnnnnnnnnnnnnnnnnnnnnnnnnnnnnnnnnnnnnnnnnnnnnnnnnnnnnnnnnnnnnnnnnnnnnnnnnnnnnnnnnnnnnnnnnnnnnnnnnnnnnnnnnnnnnnnnnnnnnnnnnnnnnnnnnnnnnnnnnnnnnnnnnnnnnnnnnnnnnnnnnnnnnnnnnnnnnnnnnnnnnnnnnnnnnnnnnnnnnnnnnnnnnnnnnnnnnnnnnnnnnnnnnnnnnnnnnnnnnnnnnnnnnnnnnnnnnnnnnnnnnnnnnnnnnnnnnnnnnnnnnnnnnnnnnnnnnnnnnnnnnnnnnnnnnnnnnnnnnnnnnnnnnnnnnnnnnnnnnnnnnnnnnnnnnnnnnnnnnnnnnnnnnnnnnnnnnnnnnnnnnnnnnnnnnnnnnnnnnnnnnnnnnnnnnnnnnnnnnnnnnnnnnnnnnnnnnnnnnnnnnnnnnnnnnnnnnnnnnnnnnnnnnnnnnnnnnnnnnnnnnnnnnnnnnnnnnnnnnnnnnnnnnnnnnnnnnnnnnnnnnnnnnnnnnnnnnnnnnnnnnnnnnnnnnnnnnnnnnnnnnnnnnnnnnnnnnnnnnnnnnnnnnnnnnnnnnnnnnnnnnnnnnnnnnnnnnnnnnnnnnnnnnnnnnnnnnnnnnnnnnnnnnnnnnnnnnnnnnnnnnnnnnnnnnnnnnnnnnnnnnnnnnnnnnnnnnnnnnnnnnnnnnnnnnnnnnnnnnnnnnnnnnnnnnnnnnnnnnnnnnnnnnnnnnnnnnnnnnnnnnnnnnnnnnnnnnnnnnnnnnnnnnnnnnnnnnnnnnnnnnnnnnnnnnnnnnnnnnnnnnnnnnnnnnnnnnnnnnnnnnnnnnnnnnnnnnnnnnnnnnnnnnnnnnnnnnnnnnnnnnnnnnnnnnnnnnnnnnnnnnnnnnnnnnnnnnnnnnnnnnnnnnnnnnnnnnnnnnnnnnnnnnnnnnnnnnnnnnnnnnnnnnnnnnnnnnnnnnnnnnnnnnnnnnnnnnnnnnnnnnnnnnnnnnnnnnnnnnnnnnnnnnnnnnnnnnnnnnnnnnnnnnnnnnnnnnnnnnnnnnnnnnnnnnnnnnnnnnnnnnnnnnnnnnnnnnnnnnnnnnnnnnnnnnnnnnnnnnnnnnnnnnnnnnnnnnnnnnnnnnnnnnnnnnnnnnnnnnnnnnnnnnnnnnnnnnnnnnnnnnnnnnnnnnnnnnnnnnnnnnnnnnnnnnnnnnnnnnnnnnnnnnnnnnnnnnnnnnnnnnnnnnnnnnnnnnnnnnnnnnnnnnnnnnnnnnnnnnnnnnnnnnnnnnnnnnnnnnnnnnnnnnnnnnnnnnnnnnnnnnnnnnnnnnnnnnnnnnnnnnnnnnnnnnnnnnnnnnnnnnnnnnnnnnnnnnnnnnnnnnnnnnnnnnnnnnnnnnnnnnnnnnnnnnnnnnnnnnnnnnnnnnnnnnnnnnnnnnnnnnnnnnnnnnnnnnnnnnnnnnnnnnnnnnnnnnnnnnnnnnnnnnnnnnnnnnnnnnnnnnnnnnnnnnnnnnnnnnnnnnnnnnnnnnnnnnnnnnnnnnnnnnnnnnnnnnnnnnnnnnnnnnnnnnnnnnnnnnnnnnnnnnnnnnnnnnnnnnnnnnnnnnnnnnnnnnnnnnnnnnnnnnnnnnnnnnnnnnnnnnnnnnnnnnnnnnnnnnnnnnnnnnnnnnnnnnnnnnnnnnnnnnnnnnnnnnnnnnnnnnnnnnnnnnnnnnnnnnnnnnnnnnnnnnnnnnnnnnnnnnnnnnnnnnnnnnnnnnnnnnnnnnnnnnnnnnnnnnnnnnnnnnnnnnnnnnnnnnnnnnnnnnnnnnnnnnnnnnnnnnnnnnnnnnnnnnnnnnnnnnnnnnnnnnnnnnnnnnnnnnnnnnnnnnnnnnnnnnnnnnnnnnnnnnnnnnnnnnnnnnnnnnnnnnnnnnnnnnnnnnnnnnnnnnnnnnnnnnnnnnnnnnnnnnnnnnnnnnnnnnnnnnnnnnnnnnnnnnnnnnnnnnnnnnnnnnnnnnnnnnnnnnnnnnnnnnnnnnnnnnnnnnnnnnnnnnnnnnnnnnnnnnnnnnnnnnnnnnnnnnnnnnnnnnnnnnnnnnnnnnnnnnnnnnnnnnnnnnnnnnnnnnnnnnnnnnnnnnnnnnnnnnnnnnnnnnnnnnnnnnnnnnnnnnnnnnnnnnnnnnnnnnnnnnnnnnnnnnnnnnnnnnnnnnnnnnnnnnnnnnnnnnnnnnnnnnnnnnnnnnnnnnnnnnnnnnnnnnnnnnnnnnnnnnnnnnnnnnnnnnnnnnnnnnnnnnnnnnnnnnnnnnnnnnnnnnnnnnnnnnnnnnnnnnnnnnnnnnnnnnnnnnnnnnnnnnnnnnnnnnnnnnnnnnnnnnnnnnnnnnnnnnnnnnnnnnnnnnnnnnnnnnnnnnnnnnnnnnnnnnnnnnnnnnnnnnnnnnnnnnnnnnnnnnnnnnnnnnnnnnnnnnnnnnnnnnnnnnnnnnnnnnnnnnnnnnnnnnnnnnnnnnnnnnnnnnnnnnnnnnnnnnnnnnnnnnnnnnnnnnnnnnnnnnnnnnnnnnnnnnnnnnnnnnnnnnnnnnnnnnnnnnnnnnnnnnnnnnnnnnnnnnnnnnnnnnnnnnnnnnnnnnnnnnnnnnnnnnnnnnnnnnnnnnnnnnnnnnnnnnnnnnnnnnnnnnnnnnnnnnnnnnnnnnnnnnnnnnnnnnnnnnnnnnnnnnnnnnnnnnnnnnnnnnnnnnnnnnnnnnnnnnnnnnnnnnnnnnnnnnnnnnnnnnnnnnnnnnnnnnnnnnnnnnnnnnnnnnnnnnnnnnnnnnnnnnnnnnnnnnnnnnnnnnnnnnnnnnnnnnnnnnnnnnnnnnnnnnnnnnnnnnnnnnnnnnnnnnnnnnnnnnnnnnnnnnnnnnnnnnnnnnnnnnnnnnnnnnnnnnnnnnnnnnnnnnnnnnnnnnnnnnnnnnnnnnnnnnnnnnnnnnnnnnnnnnnnnnnnnnnnnnnnnnnnnnnnnnnnnnnnnnnnnnnnnnnnnnnnnnnnnnnnnnnnnnnnnnnnnnnnnnnnnnnnnnnnnnnnnnnnnnnnnnnnnnnnnnnnnnnnnnnnnnnnnnnnnnnnnnnnnnnnnnnnnnnnnnnnnnnnnnnnnnnnnnnnnnnnnnnnnnnnnnnnnnnnnnnnnnnnnnnnnnnnnnnnnnnnnnnnnnnnnnnnnnnnnnnnnnnnnnnnnnnnnnnnnnnnnnnnnnnnnnnnnnnnnnnnnnnnnnnnnnnnnnnnnnnnnnnnnnnnnnnnnnnnnnnnnnnnnnnnnnnnnnnnnnnnnnnnnnnnnnnnnnnnnnnnnnnnnnnnnnnnnnnnnnnnnnnnnnnnnnnnnnnnnnnnnnnnnnnnnnnnnnnnnnnnnnnnnnnnnnnnnnnnnnnnnnnnnnnnnnnnnnnnnnnnnnnnnnnnnnnnnnnnnnnnnnnnnnnnnnnnnnnnnnnnnnnnnnnnnnnnnnnnnnnnnnnnnnnnnnnnnnnnnnnnnnnnnnnnnnnnnnnnnnnnnnnnnnnnnnnnnnnnnnnnnnnnnnnnnnnnnnnnnnnnnnnnnnnnnnnnnnnnnnnnnnnnnnnnnnnnnnnnnnnnnnnnnnnnnnnnnnnnnnnnnnnnnnnnnnnnnnnnnnnnnnnnnnnnnnnnnnnnnnnnnnnnnnnnnnnnnnnnnnnnnnnnnnnnnnnnnnnnnnnnnnnnnnnnnnnnnnnnnnnnnnnnnnnnnnnnnnnnnnnnnnnnnnnnnnnnnnnnnnnnnnnnnnnnnnnnnnnnnnnnnnnnnnnnnnnnnnnnnnnnnnnnnnnnnnnnnnnnnnnnnnnnnnnnnnnnnnnnnnnnnnnnnnnnnnnnnnnnnnnnnnnnnnnnnnnnnnnnnnnnnnnnnnnnnnnnnnnnnnnnnnnnnnnnnnnnnnnnnnnnnnnnnnnnnnnnnnnnnnnnnnnnnnnnnnnnnnnnnnnnnnnnnnnnnnnnnnnnnnnnnnnnnnnnnnnnnnnnnnnnnnnnnnnnnnnnnnnnnnnnnnnnnnnnnnnnnnnnnnnnnnnnnnnnnnnnnnnnnnnnnnnnnnnnnnnnnnnnnnnnnnnnnnnnnnnnnnnnnnnnnnnnnnnnnnnnnnnnnnnnnnnnnnnnnnnnnnnnnnnnnnnnnnnnnnnnnnnnnnnnnnnnnnnnnnnnnnnnnnnnnnnnnnnnnnnnnnnnnnnnnnnnnnnnnnnnnnnnnnnnnnnnnnnnnnnnnnnnnnnnnnnnnnnnnnnnnnnnnnnnnnnnnnnnnnnnnnnnnnnnnnnnnnnnnnnnnnnnnnnnnnnnnnnnnnnnnnnnnnnnnnnnnnnnnnnnnnnnnnnnnnnnnnnnnnnnnnnnnnnnnnnnnnnnnnnnnnnnnnnnnnnnnnnnnnnnnnnnnnnnnnnnnnnnnnnnnnnnnnnnnnnnnnnnnnnnnnnnnnnnnnnnnnnnnnnnnnnnnnnnnnnnnnnnnnnnnnnnnnnnnnnnnnnnnnnnnnnnnnnnnnnnnnnnnnnnnnnnnnnnnnnnnnnnnnnnnnnnnnnnnnnnnnnnnnnnnnnnnnnnnnnnnnnnnnnnnnnnnnnnnnnnnnnnnnnnnnnnnnnnnnnnnnnnnnnnnnnnnnnnnnnnnnnnnnnnnnnnnnnnnnnnnnnnnnnnnnnnnnnnnnnnnnnnnnnnnnnnnnnnnnnnnnnnnnnnnnnnnnnnnnnnnnnnnnnnnnnnnnnnnnnnnnnnnnnnnnnnnnnnnnnnnnnnnnnnnnnnnnnnnnnnnnnnnnnnnnnnnnnnnnnnnnnnnnnnnnnnnnnnnnnnnnnnnnnnnnnnnnnnnnnnnnnnnnnnnnnnnnnnnnnnnnnnnnnnnnnnnnnnnnnnnnnnnnnnnnnnnnnnnnnnnnnnnnnnnnnnnnnnnnnnnnnnnnnnnnnnnnnnnnnnnnnnnnnnnnnnnnnnnnnnnnnnnnnnnnnnnnnnnnnnnnnnnnnnnnnnnnnnnnnnnnnnnnnnnnnnnnnnnnnnnnnnnnnnnnnnnnnnnnnnnnnnnnnnnnnnnnnnnnnnnnnnnnnnnnnnnnnnnnnnnnnnnnnnnnnnnnnnnnnnnnnnnnnnnnnnnnnnnnnnnnnnnnnnnnnnnnnnnnnnnnnnnnnnnnnnnnnnnnnnnnnnnnnnnnnnnnnnnnnnnnnnnnnnnnnnnnnnnnnnnnnnnnnnnnnnnnnnnnnnnnnnnnnnnnnnnnnnnnnnnnnnnnnnnnnnnnnnnnnnnnnnnnnnnnnnnnnnnnnnnnnnnnnnnnnnnnnnnnnnnnnnnnnnnnnnnnnnnnnnnnnnnnnnnnnnnnnnnnnnnnnnnnnnnnnnnnnnnnnnnnnnnnnnnnnnnnnnnnnnnnnnnnnnnnnnnnnnnnnnnnnnnnnnnnnnnnnnnnnnnnnnnnnnnnnnnnnnnnnnnnnnnnnnnnnnnnnnnnnnnnnnnnnnnnnnnnnnnnnnnnnnnnnnnnnnnnnnnnnnnnnnnnnnnnnnnnnnnnnnnnnnnnnnnnnnnnnnnnnnnnnnnnnnnnnnnnnnnnnnnnnnnnnnnnnnnnnnnnnnnnnnnnnnnnnnnnnnnnnnnnnnnnnnnnnnnnnnnnnnnnnnnnnnnnnnnnnnnnnnnnnnnnnnnnnnnnnnnnnnnnnnnnnnnnnnnnnnnnnnnnnnnnnnnnnnnnnnnnnnnnnnnnnnnnnnnnnnnnnnnnnnnnnnnnnnnnnnnnnnnnnnnnnnnnnnnnnnnnnnnnnnnnnnnnnnnnnnnnnnnnnnnnnnnnnnnnnnnnnnnnnnnnnnnnnnnnnnnnnnnnnnnnnnnnnnnnnnnnnnnnnnnnnnnnnnnnnnnnnnnnnnnnnnnnnnnnnnnnnnnnnnnnnnnnnnnnnnnnnnnnnnnnnnnnnnnnnnnnnnnnnnnnnnnnnnnnnnnnnnnnnnnnnnnnnnnnnnnnnnnnnnnnnnnnnnnnnnnnnnnnnnnnnnnnnnnnnnnnnnnnnnnnnnnnnnnnnnnnnnnnnnnnnnnnnnnnnnnnnnnnnnnnnnnnnnnnnnnnnnnnnnnnnnnnnnnnnnnnnnnnnnnnnnnnnnnnnnnnnnnnnnnnnnnnnnnnnnnnnnnnnnnnnnnnnnnnnnnnnnnnnnnnnnnnnnnnnnnnnnnnnnnnnnnnnnnnnnnnnnnnnnnnnnnnnnnnnnnnnnnnnnnnnnnnnnnnnnnnnnnnnnnnnnnnnnnnnnnnnnnnnnnnnnnnnnnnnnnnnnnnnnnnnnnnnnnnnnnnnnnnnnnnnnnnnnnnnnnnnnnnnnnnnnnnnnnnnnnnnnnnnnnnnnnnnnnnnnnnnnnnnnnnnnnnnnnnnnnnnnnnnnnnnnnnnnnnnnnnnnnnnnnnnnnnnnnnnnnnnnnnnnnnnnnnnnnnnnnnnnnnnnnnnnnnnnnnnnnnnnnnnnnnnnnnnnnnnnnnnnnnnnnnnnnnnnnnnnnnnnnnnnnnnnnnnnnnnnnnnnnnnnnnnnnnnnnnnnnnnnnnnnnnnnnnnnnnnnnnnnnnnnnnnnnnnnnnnnnnnnnnnnnnnnnnnnnnnnnnnnnnnnnnnnnnnnnnnnnnnnnnnnnnnnnnnnnnnnnnnnnnnnnnnnnnnnnnnnnnnnnnnnnnnnnnnnnnnnnnnnnnnnnnnnnnnnnnnnnnnnnnnnnnnnnnnnnnnnnnnnnnnnnnnnnnnnnnnnnnnnnnnnnnnnnnnnnnnnnnnnnnnnnnnnnnnnnnnnnnnnnnnnnnnnnnnnnnnnnnnnnnnnnnnnnnnnnnnnnnnnnnnnnnnnnnnnnnnnnnnnnnnnnnnnnnnnnnnnnnnnnnnnnnnnnnnnnnnnnnnnnnnnnnnnnnnnnnnnnnnnnnnnnnnnnnnnnnnnnnnnnnnnnnnnnnnnnnnnnnnnnnnnnnnnnnnnnnnnnnnnnnnnnnnnnnnnnnnnnnnnnnnnnnnnnnnnnnnnnnnnnnnnnnnnnnnnnnnnnnnnnnnnnnnnnnnnnnnnnnnnnnnnnnnnnnnnnnnnnnnnnnnnnnnnnnnnnnnnnnnnnnnnnnnnnnnnnnnnnnnnnnnnnnnnnnnnnnnnnnnnnnnnnnnnnnnnnnnnnnnnnnnnnnnnnnnnnnnnnnnnnnnnnnnnnnnnnnnnnnnnnnnnnnnnnnnnnnnnnnnnnnnnnnnnnnnnnnnnnnnnnnnnnnnnnnnnnnnnnnnnnnnnnnnnnnnnnnnnnnnnnnnnnnnnnnnnnnnnnnnnnnnnnnnnnnnnnnnnnnnnnnnnnnnnnnnnnnnnnnnnnnnnnnnnnnnnnnnnnnnnnnnnnnnnnnnnnnnnnnnnnnnnnnnnnnnnnnnnnnnnnnnnnnnnnnnnnnnnnnnnnnnnnnnnnnnnnnnnnnnnnnnnnnnnnnnnnnnnnnnnnnnnnnnnnnnnnnnnnnnnnnnnnnnnnnnnnnnnnnnnnnnnnnnnnnnnnnnnnnnnnnnnnnnnnnnnnnnnnnnnnnnnnnnnnnnnnnnnnnnnnnnnnnnnnnnnnnnnnnnnnnnnnnnnnnnnnnnnnnnnnnnnnnnnnnnnnnnnnnnnnnnnnnnnnnnnnnnnnnnnnnnnnnnnnnnnnnnnnnnnnnnnnnnnnnnnnnnnnnnnnnnnnnnnnnnnnnnnnnnnnnnnnnnnnnnnnnnnnnnnnnnnnnnnnnnnnnnnnnnnnnnnnnnnnnnnnnnnnnnnnnnnnnnnnnnnnnnnnnnnnnnnnnnnnnnnnnnnnnnnnnnnnnnnnnnnnnnnnnnnnnnnnnnnnnnnnnnnnnnnnnnnnnnnnnnnnnnnnnnnnnnnnnnnnnnnnnnnnnnnnnnnnnnnnnnnnnnnnnnnnnnnnnnnnnnnnnnnnnnnnnnnnnnnnnnnnnnnnnnnnnnnnnnnnnnnnnnnnnnnnnnnnnnnnnnnnnnnnnnnnnnnnnnnnnnnnnnnnnnnnnnnnnnnnnnnnnnnnnnnnnnnnnnnnnnnnnnnnnnnnnnnnnnnnnnnnnnnnnnnnnnnnnnnnnnnnnnnnnnnnnnnnnnnnnnnnnnnnnnnnnnnnnnnnnnnnnnnnnnnnnnnnnnnnnnnnnnnnnnnnnnnnnnnnnnnnnnnnnnnnnnnnnnnnnnnnnnnnnnnnnnnnnnnnnnnnnnnnnnnnnnnnnnnnnnnnnnnnnnnnnnnnnnnnnnnnnnnnnnnnnnnnnnnnnnnnnnnnnnnnnnnnnnnnnnnnnnnnnnnnnnnnnnnnnnnnnnnnnnnnnnnnnnnnnnnnnnnnnnnnnnnnnnnnnnnnnnnnnnnnnnnnnnnnnnnnnnnnnnnnnnnnnnnnnnnnnnnnnnnnnnnnnnnnnnnnnnnnnnnnnnnnnnnnnnnnnnnnnnnnnnnnnnnnnnnnnnnnnnnnnnnnnnnnnnnnnnnnnnnnnnnnnnnnnnnnnnnnnnnnnnnnnnnnnnnnnnnnnnnnnnnnnnnnnnnnnnnnnnnnnnnnnnnnnnnnnnnnnnnnnnnnnnnnnnnnnnnnnnnnnnnnnnnnnnnnnnnnnnnnnnnnnnnnnnnnnnnnnnnnnnnnnnnnnnnnnnnnnnnnnnnnnnnnnnnnnnnnnnnnnnnnnnnnnnnnnnnnnnnnnnnnnnnnnnnnnnnnnnnnnnnnnnnnnnnnnnnnnnnnnnnnnnnnnnnnnnnnnnnnnnnnnnnnnnnnnnnnnnnnnnnnnnnnnnnnnnnnnnnnnnnnnnnnnnnnnnnnnnnnnnnnnnnnnnnnnnnnnnnnnnnnnnnnnnnnnnnnnnnnnnnnnnnnnnnnnnnnnnnnnnnnnnnnnnnnnnnnnnnnnnnnnnnnnnnnnnnnnnnnnnnnnnnnnnnnnnnnnnnnnnnnnnnnnnnnnnnnnnnnnnnnnnnnnnnnnnnnnnnnnnnnnnnnnnnnnnnnnnnnnnnnnnnnnnnnnnnnnnnnnnnnnnnnnnnnnnnnnnnnnnnnnnnnnnnnnnnnnnnnnnnnnnnnnnnnnnnnnnnnnnnnnnnnnnnnnnnnnnnnnnnnnnnnnnnnnnnnnnnnnnnnnnnnnnnnnnnnnnnnnnnnnnnnnnnnnnnnnnnnnnnnnnnnnnnnnnnnnnnnnnnnnnnnnnnnnnnnnnnnnnnnnnnnnnnnnnnnnnnnnnnnnnnnnnnnnnnnnnnnnnnnnnnnnnnnnnnnnnnnnnnnnnnnnnnnnnnnnnnnnnnnnnnnnnnnnnnnnnnnnnnnnnnnnnnnnnnnnnnnnnnnnnnnnnnnnnnnnnnnnnnnnnnnnnnnnnnnnnnnnnnnnnnnnnnnnnnnnnnnnnnnnnnnnnnnnnnnnnnnnnnnnnnnnnnnnnnnnnnnnnnnnnnnnnnnnnnnnnnnnnnnnnnnnnnnnnnnnnnnnnnnnnnnnnnnnnnnnnnnnnnnnnnnnnnnnnnnnnnnnnnnnnnnnnnnnnnnnnnnnnnnnnnnnnnnnnnnnnnnnnnnnnnnnnnnnnnnnnnnnnnnnnnnnnnnnnnnnnnnnnnnnnnnnnnnnnnnnnnnnnnnnnnnnnnnnnnnnnnnnnnnnnnnnnnnnnnnnnnnnnnnnnnnnnnnnnnnnnnnnnnnnnnnnnnnnnnnnnnnnnnnnnnnnnnnnnnnnnnnnnnnnnnnnnnnnnnnnnnnnnnnnnnnnnnnnnnnnnnnnnnnnnnnnnnnnnnnnnnnnnnnnnnnnnnnnnnnnnnnnnnnnnnnnnnnnnnnnnnnnnnnnnnnnnnnnnnnnnnnnnnnnnnnnnnnnnnnnnnnnnnnnnnnnnnnnnnnnnnnnnnnnnnnnnnnnnnnnnnnnnnnnnnnnnnnnnnnnnnnnnnnnnnnnnnnnnnnnnnnnnnnnnnnnnnnnnnnnnnnnnnnnnnnnnnnnnnnnnnnnnnnnnnnnnnnnnnnnnnnnnnnnnnnnnnnnnnnnnnnnnnnnnnnnnnnnnnnnnnnnnnnnnnnnnnnnnnnnnnnnnnnnnnnnnnnnnnnnnnnnnnnnnnnnnnnnnnnnnnnnnnnnnnnnnnnnnnnnnnnnnnnnnnnnnnnnnnnnnnnnnnnnnnnnnnnnnnnnnnnnnnnnnnnnnnnnnnnnnnnnnnnnnnnnnnnnnnnnnnnnnnnnnnnnnnnnnnnnnnnnnnnnnnnnnnnnnnnnnnnnnnnnnnnnnnnnnnnnnnnnnnnnnnnnnnnnnnnnnnnnnnnnnnnnnnnnnnnnnnnnnnnnnnnnnnnnnnnnnnnnnnnnnnnnnnnnnnnnnnnnnnnnnnnnnnnnnnnnnnnnnnnnnnnnnnnnnnnnnnnnnnnnnnnnnnnnnnnnnnnnnnnnnnnnnnnnnnnnnnnnnnnnnnnnnnnnnnnnnnnnnnnnnnnnnnnnnnnnnnnnnnnnnnnnnnnnnnnnnnnnnnnnnnnnnnnnnnnnnnnnnnnnnnnnnnnnnnnnnnnnnnnnnnnnnnnnnnnnnnnnnnnnnnnnnnnnnnnnnnnnnnnnnnnnnnnnnnnnnnnnnnnnnnnnnnnnnnnnnnnnnnnnnnnnnnnnnnnnnnnnnnnnnnnnnnnnnnnnnnnnnnnnnnnnnnnnnnnnnnnnnnnnnnnnnnnnnnnnnnnnnnnnnnnnnnnnnnnnnnnnnnnnnnnnnnnnnnnnnnnnnnnnnnnnnnnnnnnnnnnnnnnnnnnnnnnnnnnnnnnnnnnnnnnnnnnnnnnnnnnnnnnnnnnnnnnnnnnnnnnnnnnnnnnnnnnnnnnnnnnnnnnnnnnnnnnnnnnnnnnnnnnnnnnnnnnnnnnnnnnnnnnnnnnnnnnnnnnnnnnnnnnnnnnnnnnnnnnnnnnnnnnnnnnnnnnnnnnnnnnnnnnnnnnnnnnnnnnnnnnnnnnnnnnnnnnnnnnnnnnnnnnnnnnnnnnnnnnnnnnnnnnnnnnnnnnnnnnnnnnnnnnnnnnnnnnnnnnnnnnnnnnnnnnnnnnnnnnnnnnnnnnnnnnnnnnnnnnnnnnnnnnnnnnnnnnnnnnnnnnnnnnnnnnnnnnnnnnnnnnnnnnnnnnnnnnnnnnnnnnnnnnnnnnnnnnnnnnnnnnnnnnnnnnnnnnnnnnnnnnnnnnnnnnnnnnnnnnnnnnnnnnnnnnnnnnnnnnnnnnnnnnnnnnnnnnnnnnnnnnnnnnnnnnnnnnnnnnnnnnnnnnnnnnnnnnnnnnnnnnnnnnnnnnnnnnnnnnnnnnnnnnnnnnnnnnnnnnnnnnnnnnnnnnnnnnnnnnnnnnnnnnnnnnnnnnnnnnnnnnnnnnnnnnnnnnnnnnnnnnnnnnnnnnnnnnnnnnnnnnnnnnnnnnnnnnnnnnnnnnnnnnnnnnnnnnnnnnnnnnnnnnnnnnnnnnnnnnnnnnnnnnnnnnnnnnnnnnnnnnnnnnnnnnnnnnnnnnnnnnnnnnnnnnnnnnnnnnnnnnnnnnnnnnnnnnnnnnnnnnnnnnnnnnnnnnnnnnnnnnnnnnnnnnnnnnnnnnnnnnnnnnnnnnnnnnnnnnnnnnnnnnnnnnnnnnnnnnnnnnnnnnnnnnnnnnnnnnnnnnnnnnnnnnnnnnnnnnnnnnnnnnnnnnnnnnnnnnnnnnnnnnnnnnnnnnnnnnnnnnnnnnnnnnnnnnnnnnnnnnnnnnnnnnnnnnnnnnnnnnnnnnnnnnnnnnnnnnnnnnnnnnnnnnnnnnnnnnnnnnnnnnnnnnnnnnnnnnnnnnnnnnnnnnnnnnnnnnnnnnnnnnnnnnnnnnnnnnnnnnnnnnnnnnnnnnnnnnnnnnnnnnnnnnnnnnnnnnnnnnnnnnnnnnnnnnnnnnnnnnnnnnnnnnnnnnnnnnnnnnnnnnnnnnnnnnnnnnnnnnnnnnnnnnnnnnnnnnnnnnnnnnnnnnnnnnnnnnnnnnnnnnnnnnnnnnnnnnnnnnnnnnnnnnnnnnnnnnnnnnnnnnnnnnnnnnnnnnnnnnnnnnnnnnnnnnnnnnnnnnnnnnnnnnnnnnnnnnnnnnnnnnnnnnnnnnnnnnnnnnnnnnnnnnnnnnnnnnnnnnnnnnnnnnnnnnnnnnnnnnnnnnnnnnnnnnnnnnnnnnnnnnnnnnnnnnnnnnnnnnnnnnnnnnnnnnnnnnnnnnnnnnnnnnnnnnnnnnnnnnnnnnnnnnnnnnnnnnnnnnnnnnnnnnnnnnnnnnnnnnnnnnnnnnnnnnnnnnnnnnnnnnnnnnnnnnnnnnnnnnnnnnnnnnnnnnnnnnnnnnnnnnnnnnnnnnnnnnnnnnnnnnnnnnnnnnnnnnnnnnnnnnnnnnnnnnnnnnnnnnnnnnnnnnnnnnnnnnnnnnnnnnnnnnnnnnnnnnnnnnnnnnnnnnnnnnnnnnnnnnnnnnnnnnnnnnnnnnnnnnnnnnnnnnnnnnnnnnnnnnnnnnnnnnnnnnnnnnnnnnnnnnnnnnnnnnnnnnnnnnnnnnnnnnnnnnnnnnnnnnnnnnnnnnnnnnnnnnnnnnnnnnnnnnnnnnnnnnnnnnnnnnnnnnnnnnnnnnnnnnnnnnnnnnnnnnnnnnnnnnnnnnnnnnnnnnnnnnnnnnnnnnnnnnnnnnnnnnnnnnnnnnnnnnnnnnnnnnnnnnnnnnnnnnnnnnnnnnnnnnnnnnnnnnnnnnnnnnnnnnnnnnnnnnnnnnnnnnnnnnnnnnnnnnnnnnnnnnnnnnnnnnnnnnnnnnnnnnnnnnnnnnnnnnnnnnnnnnnnnnnnnnnnnnnnnnnnnnnnnnnnnnnnnnnnnnnnnnnnnnnnnnnnnnnnnnnnnnnnnnnnnnnnnnnnnnnnnnnnnnnnnnnnnnnnnnnnnnnnnnnnnnnnnnnnnnnnnnnnnnnnnnnnnnnnnnnnnnnnnnnnnnnnnnnnnnnnnnnnnnnnnnnnnnnnnnnnnnnnnnnnnnnnnnnnnnnnnnnnnnnnnnnnnnnnnnnnnnnnnnnnnnnnnnnnnnnnnnnnnnnnnnnnnnnnnnnnnnnnnnnnnnnnnnnnnnnnnnnnnnnnnnnnnnnnnnnnnnnnnnnnnnnnnnnnnnnnnnnnnnnnnnnnnnnnnnnnnnnnnnnnnnnnnnnnnnnnnnnnnnnnnnnnnnnnnnnnnnnnnnnnnnnnnnnnnnnnnnnnnnnnnnnnnnnnnnnnnnnnnnnnnnnnnnnnnnnnnnnnnnnnnnnnnnnnnnnnnnnnnnnnnnnnnnnnnnnnnnnnnnnnnnnnnnnnnnnnnnnnnnnnnnnnnnnnnnnnnnnnnnnnnnnnnnnnnnnnnnnnnnnnnnnnnnnnnnnnnnnnnnnnnnnnnnnnnnnnnnnnnnnnnnnnnnnnnnnnnnnnnnnnnnnnnnnnnnnnnnnnnnnnnnnnnnnnnnnnnnnnnnnnnnnnnnnnnnnnnnnnnnnnnnnnnnnnnnnnnnnnnnnnnnnnnnnnnnnnnnnnnnnnnnnnnnnnnnnnnnnnnnnnnnnnnnnnnnnnnnnnnnnnnnnnnnnnnnnnnnnnnnnnnnnnnnnnnnnnnnnnnnnnnnnnnnnnnnnnnnnnnnnnnnnnnnnnnnnnnnnnnnnnnnnnnnnnnnnnnnnnnnnnnnnnnnnnnnnnnnnnnnnnnnnnnnnnnnnnnnnnnnnnnnnnnnnnnnnnnnnnnnnnnnnnnnnnnnnnnnnnnnnnnnnnnnnnnnnnnnnnnnnnnnnnnnnnnnnnnnnnnnnnnnnnnnnnnnnnnnnnnnnnnnnnnnnnnnnnnnnnnnnnnnnnnnnnnnnnnnnnnnnnnnnnnnnnnnnnnnnnnnnnnnnnnnnnnnnnnnnnnnnnnnnnnnnnnnnnnnnnnnnnnnnnnnnnnnnnnnnnnnnnnnnnnnnnnnnnnnnnnnnnnnnnnnnnnnnnnnnnnnnnnnnnnnnnnnnnnnnnnnnnnnnnnnnnnnnnnnnnnnnnnnnnnnnnnnnnnnnnnnnnnnnnnnnnnnnnnnnnnnnnnnnnnnnnnnnnnnnnnnnnnnnnnnnnnnnnnnnnnnnnnnnnnnnnnnnnnnnnnnnnnnnnnnnnnnnnnnnnnnnnnnnnnnnnnnnnnnnnnnnnnnnnnnnnnnnnnnnnnnnnnnnnnnnnnnnnnnnnnnnnnnnnnnnnnnnnnnnnnnnnnnnnnnnnnnnnnnnnnnnnnnnnnnnnnnnnnnnnnnnnnnnnnnnnnnnnnnnnnnnnnnnnnnnnnnnnnnnnnnnnnnnnnnnnnnnnnnnnnnnnnnnnnnnnnnnnnnnnnnnnnnnnnnnnnnnnnnnnnnnnnnnnnnnnnnnnnnnnnnnnnnnnnnnnnnnnnnnnnnnnnnnnnnnnnnnnnnnnnnnnnnnnnnnnnnnnnnnnnnnnnnnnnnnnnnnnnnnnnnnnnnnnnnnnnnnnnnnnnnnnnnnnnnnnnnnnnnnnnnnnnnnnnnnnnnnnnnnnnnnnnnnnnnnnnnnnnnnnnnnnnnnnnnnnnnnnnnnnnnnnnnnnnnnnnnnnnnnnnnnnnnnnnnnnnnnnnnnnnnnnnnnnnnnnnnnnnnnnnnnnnnnnnnnnnnnnnnnnnnnnnnnnnnnnnnnnnnnnnnnnnnnnnnnnnnnnnnnnnnnnnnnnnnnnnnnnnnnnnnnnnnnnnnnnnnnnnnnnnnnnnnnnnnnnnnnnnnnnnnnnnnnnnnnnnnnnnnnnnnnnnnnnnnnnnnnnnnnnnnnnnnnnnnnnnnnnnnnnnnnnnnnnnnnnnnnnnnnnnnnnnnnnnnnnnnnnnnnnnnnnnnnnnnnnnnnnnnnnnnnnnnnnnnnnnnnnnnnnnnnnnnnnnnnnnnnnnnnnnnnnnnnnnnnnnnnnnnnnnnnnnnnnnnnnnnnnnnnnnnnnnnnnnnnnnnnnnnnnnnnnnnnnnnnnnnnnnnnnnnnnnnnnnnnnnnnnnnnnnnnnnnnnnnnnnnnnnnnnnnnnnnnnnnnnnnnnnnnnnnnnnnnnnnnnnnnnnnnnnnnnnnnnnnnnnnnnnnnnnnnnnnnnnnnnnnnnnnnnnnnnnnnnnnnnnnnnnnnnnnnnnnnnnnnnnnnnnnnnnnnnnnnnnnnnnnnnnnnnnnnnnnnnnnnnnnnnnnnnnnnnnnnnnnnnnnnnnnnnnnnnnnnnnnnnnnnnnnnnnnnnnnnnnnnnnnnnnnnnnnnnnnnnnnnnnnnnnnnnnnnnnnnnnnnnnnnnnnnnnnnnnnnnnnnnnnnnnnnnnnnnnnnnnnnnnnnnnnnnnnnnnnnnnnnnnnnnnnnnnnnnnnnnnnnnnnnnnnnnnnnnnnnnnnnnnnnnnnnnnnnnnnnnnnnnnnnnnnnnnnnnnnnnnnnnnnnnnnnnnnnnnnnnnnnnnnnnnnnnnnnnnnnnnnnnnnnnnnnnnnnnnnnnnnnnnnnnnnnnnnnnnnnnnnnnnnnnnnnnnnnnnnnnnnnnnnnnnnnnnnnnnnnnnnnnnnnnnnnnnnnnnnnnnnnnnnnnnnnnnnnnnnnnnnnnnnnnnnnnnnnnnnnnnnnnnnnnnnnnnnnnnnnnnnnnnnnnnnnnnnnnnnnnnnnnnnnnnnnnnnnnnnnnnnnnnnnnnnnnnnnnnnnnnnnnnnnnnnnnnnnnnnnnnnnnnnnnnnnnnnnnnnnnnnnnnnnnnnnnnnnnnnnnnnnnnnnnnnnnnnnnnnnnnnnnnnnnnnnnnnnnnnnnnnnnnnnnnnnnnnnnnnnnnnnnnnnnnnnnnnnnnnnnnnnnnnnnnnnnnnnnnnnnnnnnnnnnnnnnnnnnnnnnnnnnnnnnnnnnnnnnnnnnnnnnnnnnnnnnnnnnnnnnnnnnnnnnnnnnnnnnnnnnnnnnnnnnnnnnnnnnnnnnnnnnnnnnnnnnnnnnnnnnnnnnnnnnnnnnnnnnnnnnnnnnnnnnnnnnnnnnnnnnnnnnnnnnnnnnnnnnnnnnnnnnnnnnnnnnnnnnnnnnnnnnnnnnnnnnnnnnnnnnnnnnnnnnnnnnnnnnnnnnnnnnnnnnnnnnnnnnnnnnnnnnnnnnnnnnnnnnnnnnnnnnnnnnnnnnnnnnnnnnnnnnnnnnnnnnnnnnnnnnnnnnnnnnnnnnnnnnnnnnnnnnnnnnnnnnnnnnnnnnnnnnnnnnnnnnnnnnnnnnnnnnnnnnnnnnnnnnnnnnnnnnnnnnnnnnnnnnnnnnnnnnnnnnnnnnnnnnnnnnnnnnnnnnnnnnnnnnnnnnnnnnnnnnnnnnnnnnnnnnnnnnnnnnnnnnnnnnnnnnnnnnnnnnnnnnnnnnnnnnnnnnnnnnnnnnnnnnnnnnnnnnnnnnnnnnnnnnnnnnnnnnnnnnnnnnnnnnnnnnnnnnnnnnnnnnnnnnnnnnnnnnnnnnnnnnnnnnnnnnnnnnnnnnnnnnnnnnnnnnnnnnnnnnnnnnnnnnnnnnnnnnnnnnnnnnnnnnnnnnnnnnnnnnnnnnnnnnnnnnnnnnnnnnnnnnnnnnnnnnnnnnnnnnnnnnnnnnnnnnnnnnnnnnnnnnnnnnnnnnnnnnnnnnnnnnnnnnnnnnnnnnnnnnnnnnnnnnnnnnnnnnnnnnnnnnnnnnnnnnnnnnnnnnnnnnnnnnnnnnnnnnnnnnnnnnnnnnnnnnnnnnnnnnnnnnnnnnnnnnnnnnnnnnnnnnnnnnnnnnnnnnnnnnnnnnnnnnnnnnnnnnnnnnnnnnnnnnnnnnnnnnnnnnnnnnnnnnnnnnnnnnnnnnnnnnnnnnnnnnnnnnnnnnnnnnnnnnnnnnnnnnnnnnnnnnnnnnnnnnnnnnnnnnnnnnnnnnnnnnnnnnnnnnnnnnnnnnnnnnnnnnnnnnnnnnnnnnnnnnnnnnnnnnnnnnnnnnnnnnnnnnnnnnnnnnnnnnnnnnnnnnnnnnnnnnnnnnnnnnnnnnnnnnnnnnnnnnnnnnnnnnnnnnnnnnnnnnnnnnnnnnnnnnnnnnnnnnnnnnnnnnnnnnnnnnnnnnnnnnnnnnnnnnnnnnnnnnnnnnnnnnnnnnnnnnnnnnnnnnnnnnnnnnnnnnnnnnnnnnnnnnnnnnnnnnnnnnnnnnnnnnnnnnnnnnnnnnnnnnnnnnnnnnnnnnnnnnnnnnnnnnnnnnnnnnnnnnnnnnnnnnnnnnnnnnnnnnnnnnnnnnnnnnnnnnnnnnnnnnnnnnnnnnnnnnnnnnnnnnnnnnnnnnnnnnnnnnnnnnnnnnnnnnnnnnnnnnnnnnnnnnnnnnnnnnnnnnnnnnnnnnnnnnnnnnnnnnnnnnnnnnnnnnnnnnnnnnnnnnnnnnnnnnnnnnnnnnnnnnnnnnnnnnnnnnnnnnnnnnnnnnnnnnnnnnnnnnnnnnnnnnnnnnnnnnnnnnnnnnnnnnnnnnnnnnnnnnnnnnnnnnnnnnnnnnnnnnnnnnnnnnnnnnnnnnnnnnnnnnnnnnnnnnnnnnnnnnnnnnnnnnnnnnnnnnnnnnnnnnnnnnnnnnnnnnnnnnnnnnnnnnnnnnnnnnnnnnnnnnnnnnnnnnnnnnnnnnnnnnnnnnnnnnnnnnnnnnnnnnnnnnnnnnnnnnnnnnnnnnnnnnnnnnnnnnnnnnnnnnnnnnnnnnnnnnnnnnnnnnnnnnnnnnnnnnnnnnnnnnnnnnnnnnnnnnnnnnnnnnnnnnnnnnnnnnnnnnnnnnnnnnnnnnnnnnnnnnnnnnnnnnnnnnnnnnnnnnnnnnnnnnnnnnnnnnnnnnnnnnnnnnnnnnnnnnnnnnnnnnnnnnnnnnnnnnnnnnnnnnnnnnnnnnnnnnnnnnnnnnnnnnnnnnnnnnnnnnnnnnnnnnnnnnnnnnnnnnnnnnnnnnnnnnnnnnnnnnnnnnnnnnnnnnnnnnnnnnnnnnnnnnnnnnnnnnnnnnnnnnnnnnnnnnnnnnnnnnnnnnnnnnnnnnnnnnnnnnnnnnnnnnnnnnnnnnnnnnnnnnnnnnnnnnnnnnnnnnnnnnnnnnnnnnnnnnnnnnnnnnnnnnnnnnnnnnnnnnnnnnnnnnnnnnnnnnnnnnnnnnnnnnnnnnnnnnnnnnnnnnnnnnnnnnnnnnnnnnnnnnnnnnnnnnnnnnnnnnnnnnnnnnnnnnnnnnnnnnnnnnnnnnnnnnnnnnnnnnnnnnnnnnnnnnnnnnnnnnnnnnnnnnnnnnnnnnnnnnnnnnnnnnnnnnnnnnnnnnnnnnnnnnnnnnnnnnnnnnnnnnnnnnnnnnnnnnnnnnnnnnnnnnnnnnnnnnnnnnnnnnnnnnnnnnnnnnnnnnnnnnnnnnnnnnnnnnnnnnnnnnnnnnnnnnnnnnnnnnnnnnnnnnnnnnnnnnnnnnnnnnnnnnnnnnnnnnnnnnnnnnnnnnnnnnnnnnnnnnnnnnnnnnnnnnnnnnnnnnnnnnnnnnnnnnnnnnnnnnnnnnnnnnnnnnnnnnnnnnnnnnnnnnnnnnnnnnnnnnnnnnnnnnnnnnnnnnnnnnnnnnnnnnnnnnnnnnnnnnnnnnnnnnnnnnnnnnnnnnnnnnnnnnnnnnnnnnnnnnnnnnnnnnnnnnnnnnnnnnnnnnnnnnnnnnnnnnnnnnnnnnnnnnnnnnnnnnnnnnnnnnnnnnnnnnnnnnnnnnnnnnnnnnnnnnnnnnnnnnnnnnnnnnnnnnnnnnnnnnnnnnnnnnnnnnnnnnnnnnnnnnnnnnnnnnnnnnnnnnnnnnnnnnnnnnnnnnnnnnnnnnnnnnnnnnnnnnnnnnnnnnnnnnnnnnnnnnnnnnnnnnnnnnnnnnnnnnnnnnnnnnnnnnnnnnnnnnnnnnnnnnnnnnnnnnnnnnnnnnnnnnnnnnnnnnnnnnnnnnnnnnnnnnnnnnnnnnnnnnnnnnnnnnnnnnnnnnnnnnnnnnnnnnnnnnnnnnnnnnnnnnnnnnnnnnnnnnnnnnnnnnnnnnnnnnnnnnnnnnnnnnnnnnnnnnnnnnnnnnnnnnnnnnnnnnnnnnnnnnnnnnnnnnnnnnnnnnnnnnnnnnnnnnnnnnnnnnnnnnnnnnnnnnnnnnnnnnnnnnnnnnnnnnnnnnnnnnnnnnnnnnnnnnnnnnnnnnnnnnnnnnnnnnnnnnnnnnnnnnnnnnnnnnnnnnnnnnnnnnnnnnnnnnnnnnnnnnnnnnnnnnnnnnnnnnnnnnnnnnnnnnnnnnnnnnnnnnnnnnnnnnnnnnnnnnnnnnnnnnnnnnnnnnnnnnnnnnnnnnnnnnnnnnnnnnnnnnnnnnnnnnnnnnnnnnnnnnnnnnnnnnnnnnnnnnnnnnnnnnnnnnnnnnnnnnnnnnnnnnnnnnnnnnnnnnnnnnnnnnnnnnnnnnnnnnnnnnnnnnnnnnnnnnnnnnnnnnnnnnnnnnnnnnnnnnnnnnnnnnnnnnnnnnnnnnnnnnnnnnnnnnnnnnnnnnnnnnnnnnnnnnnnnnnnnnnnnnnnnnnnnnnnnnnnnnnnnnnnnnnnnnnnnnnnnnnnnnnnnnnnnnnnnnnnnnnnnnnnnnnnnnnnnnnnnnnnnnnnnnnnnnnnnnnnnnnnnnnnnnnnnnnnnnnnnnnnnnnnnnnnnnnnnnnnnnnnnnnnnnnnnnnnnnnnnnnnnnnnnnnnnnnnnnnnnnnnnnnnnnnnnnnnnnnnnnnnnnnnnnnnnnnnnnnnnnnnnnnnnnnnnnnnnnnnnnnnnnnnnnnnnnnnnnnnnnnnnnnnnnnnnnnnnnnnnnnnnnnnnnnnnnnnnnnnnnnnnnnnnnnnnnnnnnnnnnnnnnnnnnnnnnnnnnnnnnnnnnnnnnnnnnnnnnnnnnnnnnnnnnnnnnnnnnnnnnnnnnnnnnnnnnnnnnnnnnnnnnnnnnnnnnnnnnnnnnnnnnnnnnnnnnnnnnnnnnnnnnnnnnnnnnnnnnnnnnnnnnnnnnnnnnnnnnnnnnnnnnnnnnnnnnnnnnnnnnnnnnnnnnnnnnnnnnnnnnnnnnnnnnnnnnnnnnnnnnnnnnnnnnnnnnnnnnnnnnnnnnnnnnnnnnnnnnnnnnnnnnnnnnnnnnnnnnnnnnnnnnnnnnnnnnnnnnnnnnnnnnnnnnnnnnnnnnnnnnnnnnnnnnnnnnnnnnnnnnnnnnnnnnnnnnnnnnnnnnnnnnnnnnnnnnnnnnnnnnnnnnnnnnnnnnnnnnnnnnnnnnnnnnnnnnnnnnnnnnnnnnnnnnnnnnnnnnnnnnnnnnnnnnnnnnnnnnnnnnnnnnnnnnnnnnnnnnnnnnnnnnnnnnnnnnnnnnnnnnnnnnnnnnnnnnnnnnnnnnnnnnnnnnnnnnnnnnnnnnnnnnnnnnnnnnnnnnnnnnnnnnnnnnnnnnnnnnnnnnnnnnnnnnnnnnnnnnnnnnnnnnnnnnnnnnnnnnnnnnnnnnnnnnnnnnnnnnnnnnnnnnnnnnnnnnnnnnnnnnnnnnnnnnnnnnnnnnnnnnnnnnnnnnnnnnnnnnnnnnnnnnnnnnnnnnnnnnnnnnnnnnnnnnnnnnnnnnnnnnnnnnnnnnnnnnnnnnnnnnnnnnnnnnnnnnnnnnnnnnnnnnnnnnnnnnnnnnnnnnnnnnnnnnnnnnnnnnnnnnnnnnnnnnnnnnnnnnnnnnnnnnnnnnnnnnnnnnnnnnnnnnnnnnnnnnnnnnnnnnnnnnnnnnnnnnnnnnnnnnnnnnnnnnnnnnnnnnnnnnnnnnnnnnnnnnnnnnnnnnnnnnnnnnnnnnnnnnnnnnnnnnnnnnnnnnnnnnnnnnnnnnnnnnnnnnnnnnnnnnnnnnnnnnnnnnnnnnnnnnnnnnnnnnnnnnnnnnnnnnnnnnnnnnnnnnnnnnnnnnnnnnnnnnnnnnnnnnnnnnnnnnnnnnnnnnnnnnnnnnnnnnnnnnnnnnnnnnnnnnnnnnnnnnnnnnnnnnnnnnnnnnnnnnnnnnnnnnnnnnnnnnnnnnnnnnnnnnnnnnnnnnnnnnnnnnnnnnnnnnnnnnnnnnnnnnnnnnnnnnnnnnnnnnnnnnnnnnnnnnnnnnnnnnnnnnnnnnnnnnnnnnnnnnnnnnnnnnnnnnnnnnnnnnnnnnnnnnnnnnnnnnnnnnnnnnnnnnnnnnnnnnnnnnnnnnnnnnnnnnnnnnnnnnnnnnnnnnnnnnnnnnnnnnnnnnnnnnnnnnnnnnnnnnnnnnnnnnnnnnnnnnnnnnnnnnnnnnnnnnnnnnnnnnnnnnnnnnnnnnnnnnnnnnnnnnnnnnnnnnnnnnnnnnnnnnnnnnnnnnnnnnnnnnnnnnnnnnnnnnnnnnnnnnnnnnnnnnnnnnnnnnnnnnnnnnnnnnnnnnnnnnnnnnnnnnnnnnnnnnnnnnnnnnnnnnnnnnnnnnnnnnnnnnnnnnnnnnnnnnnnnnnnnnnnnnnnnnnnnnnnnnnnnnnnnnnnnnnnnnnnnnnnnnnnnnnnnnnnnnnnnnnnnnnnnnnnnnnnnnnnnnnnnnnnnnnnnnnnnnnnnnnnnnnnnnnnnnnnnnnnnnnnnnnnnnnnnnnnnnnnnnnnnnnnnnnnnnnnnnnnnnnnnnnnnnnnnnnnnnnnnnnnnnnnnnnnnnnnnnnnnnnnnnnnnnnnnnnnnnnnnnnnnnnnnnnnnnnnnnnnnnnnnnnnnnnnnnnnnnnnnnnnnnnnnnnnnnnnnnnnnnnnnnnnnnnnnnnnnnnnnnnnnnnnnnnnnnnnnnnnnnnnnnnnnnnnnnnnnnnnnnnnnnnnnnnnnnnnnnnnnnnnnnnnnnnnnnnnnnnnnnnnnnnnnnnnnnnnnnnnnnnnnnnnnnnnnnnnnnnnnnnnnnnnnnnnnnnnnnnnnnnnnnnnnnnnnnnnnnnnnnnnnnnnnnnnnnnnnnnnnnnnnnnnnnnnnnnnnnnnnnnnnnnnnnnnnnnnnnnnnnnnnnnnnnnnnnnnnnnnnnnnnnnnnnnnnnnnnnnnnnnnnnnnnnnnnnnnnnnnnnnnnnnnnnnnnnnnnnnnnnnnnnnnnnnnnnnnnnnnnnnnnnnnnnnnnnnnnnnnnnnnnnnnnnnnnnnnnnnnnnnnnnnnnnnnnnnnnnnnnnnnnnnnnnnnnnnnnnnnnnnnnnnnnnnnnnnnnnnnnnnnnnnnnnnnnnnnnnnnnnnnnnnnnnnnnnnnnnnnnnnnnnnnnnnnnnnnnnnnnnnnnnnnnnnnnnnnnnnnnnnnnnnnnnnnnnnnnnnnnnnnnnnnnnnnnnnnnnnnnnnnnnnnnnnnnnnnnnnnnnnnnnnnnnnnnnnnnnnnnnnnnnnnnnnnnnnnnnnnnnnnnnnnnnnnnnnnnnnnnnnnnnnnnnnnnnnnnnnnnnnnnnnnnnnnnnnnnnnnnnnnnnnnnnnnnnnnnnnnnnnnnnnnnnnnnnnnnnnnnnnnnnnnnnnnnnnnnnnnnnnnnnnnnnnnnnnnnnnnnnnnnnnnnnnnnnnnnnnnnnnnnnnnnnnnnnnnnnnnnnnnnnnnnnnnnnnnnnnnnnnnnnnnnnnnnnnnnnnnnnnnnnnnnnnnnnnnnnnnnnnnnnnnnnnnnnnnnnnnnnnnnnnnnnnnnnnnnnnnnnnnnnnnnnnnnnnnnnnnnnnnnnnnnnnnnnnnnnnnnnnnnnnnnnnnnnnnnnnnnnnnnnnnnnnnnnnnnnnnnnnnnnnnnnnnnnnnnnnnnnnnnnnnnnnnnnnnnnnnnnnnnnnnnnnnnnnnnnnnnnnnnnnnnnnnnnnnnnnnnnnnnnnnnnnnnnnnnnnnnnnnnnnnnnnnnnnnnnnnnnnnnnnnnnnnnnnnnnnnnnnnnnnnnnnnnnnnnnnnnnnnnnnnnnnnnnnnnnnnnnnnnnnnnnnnnnnnnnnnnnnnnnnnnnnnnnnnnnnnnnnnnnnnnnnnnnnnnnnnnnnnnnnnnnnnnnnnnnnnnnnnnnnnnnnnnnnnnnnnnnnnnnnnnnnnnnnnnnnnnnnnnnnnnnnnnnnnnnnnnnnnnnnnnnnnnnnnnnnnnnnnnnnnnnnnnnnnnnnnnnnnnnnnnnnnnnnnnnnnnnnnnnnnnnnnnnnnnnnnnnnnnnnnnnnnnnnnnnnnnnnnnnnnnnnnnnnnnnnnnnnnnnnnnnnnnnnnnnnnnnnnnnnnnnnnnnnnnnnnnnnnnnnnnnnnnnnnnnnnnnnnnnnnnnnnnnnnnnnnnnnnnnnnnnnnnnnnnnnnnnnnnnnnnnnnnnnnnnnnnnnnnnnnnnnnnnnnnnnnnnnnnnnnnnnnnnnnnnnnnnnnnnnnnnnnnnnnnnnnnnnnnnnnnnnnnnnnnnnnnnnnnnnnnnnnnnnnnnnnnnnnnnnnnnnnnnnnnnnnnnnnnnnnnnnnnnnnnnnnnnnnnnnnnnnnnnnnnnnnnnnnnnnnnnnnnnnnnnnnnnnnnnnnnnnnnnnnnnnnnnnnnnnnnnnnnnnnnnnnnnnnnnnnnnnnnnnnnnnnnnnnnnnnnnnnnnnnnnnnnnnnnnnnnnnnnnnnnnnnnnnnnnnnnnnnnnnnnnnnnnnnnnnnnnnnnnnnnnnnnnnnnnnnnnnnnnnnnnnnnnnnnnnnnnnnnnnnnnnnnnnnnnnnnnnnnnnnnnnnnnnnnnnnnnnnnnnnnnnnnnnnnnnnnnnnnnnnnnnnnnnnnnnnnnnnnnnnnnnnnnnnnnnnnnnnnnnnnnnnnnnnnnnnnnnnnnnnnnnnnnnnnnnnnnnnnnnnnnnnnnnnnnnnnnnnnnnnnnnnnnnnnnnnnnnnnnnnnnnnnnnnnnnnnnnnnnnnnnnnnnnnnnnnnnnnnnnnnnnnnnnnnnnnnnnnnnnnnnnnnnnnnnnnnnnnnnnnnnnnnnnnnnnnnnnnnnnnnnnnnnnnnnnnnnnnnnnnnnnnnnnnnnnnnnnnnnnnnnnnnnnnnnnnnnnnnnnnnnnnnnnnnnnnnnnnnnnnnnnnnnnnnnnnnnnnnnnnnnnnnnnnnnnnnnnnnnnnnnnnnnnnnnnnnnnnnnnnnnnnnnnnnnnnnnnnnnnnnnnnnnnnnnnnnnnnnnnnnnnnnnnnnnnnnnnnnnnnnnnnnnnnnnnnnnnnnnnnnnnnnnnnnnnnnnnnnnnnnnnnnnnnnnnnnnnnnnnnnnnnnnnnnnnnnnnnnnnnnnnnnnnnnnnnnnnnnnnnnnnnnnnnnnnnnnnnnnnnnnnnnnnnnnnnnnnnnnnnnnnnnnnnnnnnnnnnnnnnnnnnnnnnnnnnnnnnnnnnnnnnnnnnnnnnnnnnnnnnnnnnnnnnnnnnnnnnnnnnnnnnnnnnnnnnnnnnnnnnnnnnnnnnnnnnnnnnnnnnnnnnnnnnnnnnnnnnnnnnnnnnnnnnnnnnnnnnnnnnnnnnnnnnnnnnnnnnnnnnnnnnnnnnnnnnnnnnnnnnnnnnnnnnnnnnnnnnnnnnnnnnnnnnnnnnnnnnnnnnnnnnnnnnnnnnnnnnnnnnnnnnnnnnnnnnnnnnnnnnnnnnnnnnnnnnnnnnnnnnnnnnnnnnnnnnnnnnnnnnnnnnnnnnnnnnnnnnnnnnnnnnnnnnnnnnnnnnnnnnnnnnnnnnnnnnnnnnnnnnnnnnnnnnnnnnnnnnnnnnnnnnnnnnnnnnnnnnnnnnnnnnnnnnnnnnnnnnnnnnnnnnnnnnnnnnnnnnnnnnnnnnnnnnnnnnnnnnnnnnnnnnnnnnnnnnnnnnnnnnnnnnnnnnnnnnnnnnnnnnnnnnnnnnnnnnnnnnnnnnnnnnnnnnnnnnnnnnnnnnnnnnnnnnnnnnnnnnnnnnnnnnnnnnnnnnnnnnnnnnnnnnnnnnnnnnnnnnnnnnnnnnnnnnnnnnnnnnnnnnnnnnnnnnnnnnnnnnnnnnnnnnnnnnnnnnnnnnnnnnnnnnnnnnnnnnnnnnnnnnnnnnnnnnnnnnnnnnnnnnnnnnnnnnnnnnnnnnnnnnnnnnnnnnnnnnnnnnnnnnnnnnnnnnnnnnnnnnnnnnnnnnnnnnnnnnnnnnnnnnnnnnnnnnnnnnnnnnnnnnnnnnnnnnnnnnnnnnnnnnnnnnnnnnnnnnnnnnnnnnnnnnnnnnnnnnnnnnnnnnnnnnnnnnnnnnnnnnnnnnnnnnnnnnnnnnnnnnnnnnnnnnnnnnnnnnnnnnnnnnnnnnnnnnnnnnnnnnnnnnnnnnnnnnnnnnnnnnnnnnnnnnnnnnnnnnnnnnnnnnnnnnnnnnnnnnnnnnnnnnnnnnnnnnnnnnnnnnnnnnnnnnnnnnnnnnnnnnnnnnnnnnnnnnnnnnnnnnnnnnnnnnnnnnnnnnnnnnnnnnnnnnnnnnnnnnnnnnnnnnnnnnnnnnnnnnnnnnnnnnnnnnnnnnnnnnnnnnnnnnnnnnnnnnnnnnnnnnnnnnnnnnnnnnnnnnnnnnnnnnnnnnnnnnnnnnnnnnnnnnnnnnnnnnnnnnnnnnnnnnnnnnnnnnnnnnnnnnnnnnnnnnnnnnnnnnnnnnnnnnnnnnnnnnnnnnnnnnnnnnnnnnnnnnnnnnnnnnnnnnnnnnnnnnnnnnnnnnnnnnnnnnnnnnnnnnnnnnnnnnnnnnnnnnnnnnnnnnnnnnnnnnnnnnnnnnnnnnnnnnnnnnnnnnnnnnnnnnnnnnnnnnnnnnnnnnnnnnnnnnnnnnnnnnnnnnnnnnnnnnnnnnnnnnnnnnnnnnnnnnnnnnnnnnnnnnnnnnnnnnnnnnnnnnnnnnnnnnnnnnnnnnnnnnnnnnnnnnnnnnnnnnnnnnnnnnnnnnnnnnnnnnnnnnnnnnnnnnnnnnnnnnnnnnnnnnnnnnnnnnnnnnnnnnnnnnnnnnnnnnnnnnnnnnnnnnnnnnnnnnnnnnnnnnnnnnnnnnnnnnnnnnnnnnnnnnnnnnnnnnnnnnnnnnnnnnnnnnnnnnnnnnnnnnnnnnnnnnnnnnnnnnnnnnnnnnnnnnnnnnnnnnnnnnnnnnnnnnnnnnnnnnnnnnnnnnnnnnnnnnnnnnnnnnnnnnnnnnnnnnnnnnnnnnnnnnnnnnnnnnnnnnnnnnnnnnnnnnnnnnnnnnnnnnnnnnnnnnnnnnnnnnnnnnnnnnnnnnnnnnnnnnnnnnnnnnnnnnnnnnnnnnnnnnnnnnnnnnnnnnnnnnnnnnnnnnnnnnnnnnnnnnnnnnnnnnnnnnnnnnnnnnnnnnnnnnnnnnnnnnnnnnnnnnnnnnnnnnnnnnnnnnnnnnnnnnnnnnnnnnnnnnnnnnnnnnnnnnnnnnnnnnnnnnnnnnnnnnnnnnnnnnnnnnnnnnnnnnnnnnnnnnnnnnnnnnnnnnnnnnnnnnnnnnnnnnnnnnnnnnnnnnnnnnnnnnnnnnnnnnnnnnnnnnnnnnnnnnnnnnnnnnnnnnnnnnnnnnnnnnnnnnnnnnnnnnnnnnnnnnnnnnnnnnnnnnnnnnnnnnnnnnnnnnnnnnnnnnnnnnnnnnnnnnnnnnnnnnnnnnnnnnnnnnnnnnnnnnnnnnnnnnnnnnnnnnnnnnnnnnnnnnnnnnnnnnnnnnnnnnnnnnnnnnnnnnnnnnnnnnnnnnnnnnnnnnnnnnnnnnnnnnnnnnnnnnnnnnnnnnnnnnnnnnnnnnnnnnnnnnnnnnnnnnnnnnnnnnnnnnnnnnnnnnnnnnnnnnnnnnnnnnnnnnnnnnnnnnnnnnnnnnnnnnnnnnnnnnnnnnnnnnnnnnnnnnnnnnnnnnnnnnnnnnnnnnnnnnnnnnnnnnnnnnnnnnnnnnnnnnnnnnnnnnnnnnnnnnnnnnnnnnnnnnnnnnnnnnnnnnnnnnnnnnnnnnnnnnnnnnnnnnnnnnnnnnnnnnnnnnnnnnnnnnnnnnnnnnnnnnnnnnnnnnnnnnnnnnnnnnnnnnnnnnnnnnnnnnnnnnnnnnnnnnnnnnnnnnnnnnnnnnnnnnnnnnnnnnnnnnnnnnnnnnnnnnnnnnnnnnnnnnnnnnnnnnnnnnnnnnnnnnnnnnnnnnnnnnnnnnnnnnnnnnnnnnnnnnnnnnnnnnnnnnnnnnnnnnnnnnnnnnnnnnnnnnnnnnnnnnnnnnnnnnnnnnnnnnnnnnnnnnnnnnnnnnnnnnnnnnnnnnnnnnnnnnnnnnnnnnnnnnnnnnnnnnnnnnnnnnnnnnnnnnnnnnnnnnnnnnnnnnnnnnnnnnnnnnnnnnnnnnnnnnnnnnnnnnnnnnnnnnnnnnnnnnnnnnnnnnnnnnnnnnnnnnnnnnnnnnnnnnnnnnnnnnnnnnnnnnnnnnnnnnnnnnnnnnnnnnnnnnnnnnnnnnnnnnnnnnnnnnnnnnnnnnnnnnnnnnnnnnnnnnnnnnnnnnnnnnnnnnnnnnnnnnnnnnnnnnnnnnnnnnnnnnnnnnnnnnnnnnnnnnnnnnnnnnnnnnnnnnnnnnnnnnnnnnnnnnnnnnnnnnnnnnnnnnnnnnnnnnnnnnnnnnnnnnnnnnnnnnnnnnnnnnnnnnnnnnnnnnnnnnnnnnnnnnnnnnnnnnnnnnnnnnnnnnnnnnnnnnnnnnnnnnnnnnnnnnnnnnnnnnnnnnnnnnnnnnnnnnnnnnnnnnnnnnnnnnnnnnnnnnnnnnnnnnnnnnnnnnnnnnnnnnnnnnnnnnnnnnnnnnnnnnnnnnnnnnnnnnnnnnnnnnnnnnnnnnnnnnnnnnnnnnnnnnnnnnnnnnnnnnnnnnnnnnnnnnnnnnnnnnnnnnnnnnnnnnnnnnnnnnnnnnnnnnnnnnnnnnnnnnnnnnnnnnnnnnnnnnnnnnnnnnnnnnnnnnnnnnnnnnnnnnnnnnnnnnnnnnnnnnnnnnnnnnnnnnnnnnnnnnnnnnnnnnnnnnnnnnnnnnnnnnnnnnnnnnnnnnnnnnnnnnnnnnnnnnnnnnnnnnnnnnnnnnnnnnnnnnnnnnnnnnnnnnnnnnnnnnnnnnnnnnnnnnnnnnnnnnnnnnnnnnnnnnnnnnnnnnnnnnnnnnnnnnnnnnnnnnnnnnnnnnnnnnnnnnnnnnnnnnnnnnnnnnnnnnnnnnnnnnnnnnnnnnnnnnnnnnnnnnnnnnnnnnnnnnnnnnnnnnnnnnnnnnnnnnnnnnnnnnnnnnnnnnnnnnnnnnnnnnnnnnnnnnnnnnnnnnnnnnnnnnnnnnnnnnnnnnnnnnnnnnnnnnnnnnnnnnnnnnnnnnnnnnnnnnnnnnnnnnnnnnnnnnnnnnnnnnnnnnnnnnnnnnnnnnnnnnnnnnnnnnnnnnnnnnnnnnnnnnnnnnnnnnnnnnnnnnnnnnnnnnnnnnnnnnnnnnnnnnnnnnnnnnnnnnnnnnnnnnnnnnnnnnnnnnnnnnnnnnnnnnnnnnnnnnnnnnnnnnnnnnnnnnnnnnnnnnnnnnnnnnnnnnnnnnnnnnnnnnnnnnnnnnnnnnnnnnnnnnnnnnnnnnnnnnnnnnnnnnnnnnnnnnnnnnnnnnnnnnnnnnnnnnnnnnnnnnnnnnnnnnnnnnnnnnnnnnnnnnnnnnnnnnnnnnnnnnnnnnnnnnnnnnnnnnnnnnnnnnnnnnnnnnnnnnnnnnnnnnnnnnnnnnnnnnnnnnnnnnnnnnnnnnnnnnnnnnnnnnnnnnnnnnnnnnnnnnnnnnnnnnnnnnnnnnnnnnnnnnnnnnnnnnnnnnnnnnnnnnnnnnnnnnnnnnnnnnnnnnnnnnnnnnnnnnnnnnnnnnnnnnnnnnnnnnnnnnnnnnnnnnnnnnnnnnnnnnnnnnnnnnnnnnnnnnnnnnnnnnnnnnnnnnnnnnnnnnnnnnnnnnnnnnnnnnnnnnnnnnnnnnnnnnnnnnnnnnnnnnnnnnnnnnnnnnnnnnnnnnnnnnnnnnnnnnnnnnnnnnnnnnnnnnnnnnnnnnnnnnnnnnnnnnnnnnnnnnnnnnnnnnnnnnnnnnnnnnnnnnnnnnnnnnnnnnnnnnnnnnnnnnnnnnnnnnnnnnnnnnnnnnnnnnnnnnnnnnnnnnnnnnnnnnnnnnnnnnnnnnnnnnnnnnnnnnnnnnnnnnnnnnnnnnnnnnnnnnnnnnnnnnnnnnnnnnnnnnnnnnnnnnnnnnnnnnnnnnnnnnnnnnnnnnnnnnnnnnnnnnnnnnnnnnnnnnnnnnnnnnnnnnnnnnnnnnnnnnnnnnnnnnnnnnnnnnnnnnnnnnnnnnnnnnnnnnnnnnnnnnnnnnnnnnnnnnnnnnnnnnnnnnnnnnnnnnnnnnnnnnnnnnnnnnnnnnnnnnnnnnnnnnnnnnnnnnnnnnnnnnnnnnnnnnnnnnnnnnnnnnnnnnnnnnnnnnnnnnnnnnnnnnnnnnnnnnnnnnnnnnnnnnnnnnnnnnnnnnnnnnnnnnnnnnnnnnnnnnnnnnnnnnnnnnnnnnnnnnnnnnnnnnnnnnnnnnnnnnnnnnnnnnnnnnnnnnnnnnnnnnnnnnnnnnnnnnnnnnnnnnnnnnnnnnnnnnnnnnnnnnnnnnnnnnnnnnnnnnnnnnnnnnnnnnnnnnnnnnnnnnnnnnnnnnnnnnnnnnnnnnnnnnnnnnnnnnnnnnnnnnnnnnnnnnnnnnnnnnnnnnnnnnnnnnnnnnnnnnnnnnnnnnnnnnnnnnnnnnnnnnnnnnnnnnnnnnnnnnnnnnnnnnnnnnnnnnnnnnnnnnnnnnnnnnnnnnnnnnnnnnnnnnnnnnnnnnnnnnnnnnnnnnnnnnnnnnnnnnnnnnnnnnnnnnnnnnnnnnnnnnnnnnnnnnnnnnnnnnnnnnnnnnnnnnnnnnnnnnnnnnnnnnnnnnnnnnnnnnnnnnnnnnnnnnnnnnnnnnnnnnnnnnnnnnnnnnnnnnnnnnnnnnnnnnnnnnnnnnnnnnnnnnnnnnnnnnnnnnnnnnnnnnnnnnnnnnnnnnnnnnnnnnnnnnnnnnnnnnnnnnnnnnnnnnnnnnnnnnnnnnnnnnnnnnnnnnnnnnnnnnnnnnnnnnnnnnnnnnnnnnnnnnnnnnnnnnnnnnnnnnnnnnnnnnnnnnnnnnnnnnnnnnnnnnnnnnnnnnnnnnnnnnnnnnnnnnnnnnnnnnnnnnnnnnnnnnnnnnnnnnnnnnnnnnnnnnnnnnnnnnnnnnnnnnnnnnnnnnnnnnnnnnnnnnnnnnnnnnnnnnnnnnnnnnnnnnnnnnnnnnnnnnnnnnnnnnnnnnnnnnnnnnnnnnnnnnnnnnnnnnnnnnnnnnnnnnnnnnnnnnnnnnnnnnnnnnnnnnnnnnnnnnnnnnnnnnnnnnnnnnnnnnnnnnnnnnnnnnnnnnnnnnnnnnnnnnnnnnnnnnnnnnnnnnnnnnnnnnnnnnnnnnnnnnnnnnnnnnnnnnnnnnnnnnnnnnnnnnnnnnnnnnnnnnnnnnnnnnnnnnnnnnnnnnnnnnnnnnnnnnnnnnnnnnnnnnnnnnnnnnnnnnnnnnnnnnnnnnnnnnnnnnnnnnnnnnnnnnnnnnnnnnnnnnnnnnnnnnnnnnnnnnnnnnnnnnnnnnnnnnnnnnnnnnnnnnnnnnnnnnnnnnnnnnnnnnnnnnnnnnnnnnnnnnnnnnnnnnnnnnnnnnnnnnnnnnnnnnnnnnnnnnnnnnnnnnnnnnnnnnnnnnnnnnnnnnnnnnnnnnnnnnnnnnnnnnnnnnnnnnnnnnnnnnnnnnnnnnnnnnnnnnnnnnnnnnnnnnnnnnnnnnnnnnnnnnnnnnnnnnnnnnnnnnnnnnnnnnnnnnnnnnnnnnnnnnnnnnnnnnnnnnnnnnnnnnnnnnnnnnnnnnnnnnnnnnnnnnnnnnnnnnnnnnnnnnnnnnnnnnnnnnnnnnnnnnnnnnnnnnnnnnnnnnnnnnnnnnnnnnnnnnnnnnnnnnnnnnnnnnnnnnnnnnnnnnnnnnnnnnnnnnnnnnnnnnnnnnnnnnnnnnnnnnnnnnnnnnnnnnnnnnnnnnnnnnnnnnnnnnnnnnnnnnnnnnnnnnnnnnnnnnnnnnnnnnnnnnnnnnnnnnnnnnnnnnnnnnnnnnnnnnnnnnnnnnnnnnnnnnnnnnnnnnnnnnnnnnnnnnnnnnnnnnnnnnnnnnnnnnnnnnnnnnnnnnnnnnnnnnnnnnnnnnnnnnnnnnnnnnnnnnnnnnnnnnnnnnnnnnnnnnnnnnnnnnnnnnnnnnnnnnnnnnnnnnnnnnnnnnnnnnnnnnnnnnnnnnnnnnnnnnnnnnnnnnnnnnnnnnnnnnnnnnnnnnnnnnnnnnnnnnnnnnnnnnnnnnnnnnnnnnnnnnnnnnnnnnnnnnnnnnnnnnnnnnnnnnnnnnnnnnnnnnnnnnnnnnnnnnnnnnnnnnnnnnnnnnnnnnnnnnnnnnnnnnnnnnnnnnnnnnnnnnnnnnnnnnnnnnnnnnnnnnnnnnnnnnnnnnnnnnnnnnnnnnnnnnnnnnnnnnnnnnnnnnnnnnnnnnnnnnnnnnnnnnnnnnnnnnnnnnnnnnnnnnnnnnnnnnnnnnnnnnnnnnnnnnnnnnnnnnnnnnnnnnnnnnnnnnnnnnnnnnnnnnnnnnnnnnnnnnnnnnnnnnnnnnnnnnnnnnnnnnnnnnnnnnnnnnnnnnnnnnnnnnnnnnnnnnnnnnnnnnnnnnnnnnnnnnnnnnnnnnnnnnnnnnnnnnnnnnnnnnnnnnnnnnnnnnnnnnnnnnnnnnnnnnnnnnnnnnnnnnnnnnnnnnnnnnnnnnnnnnnnnnnnnnnnnnnnnnnnnnnnnnnnnnnnnnnnnnnnnnnnnnnnnnnnnnnnnnnnnnnnnnnnnnnnnnnnnnnnnnnnnnnnnnnnnnnnnnnnnnnnnnnnnnnnnnnnnnnnnnnnnnnnnnnnnnnnnnnnnnnnnnnnnnnnnnnnnnnnnnnnnnnnnnnnnnnnnnnnnnnnnnnnnnnnnnnnnnnnnnnnnnnnnnnnnnnnnnnnnnnnnnnnnnnnnnnnnnnnnnnnnnnnnnnnnnnnnnnnnnnnnnnnnnnnnnnnnnnnnnnnnnnnnnnnnnnnnnnnnnnnnnnnnnnnnnnnnnnnnnnnnnnnnnnnnnnnnnnnnnnnnnnnnnnnnnnnnnnnnnnnnnnnnnnnnnnnnnnnnnnnnnnnnnnnnnnnnnnnnnnnnnnnnnnnnnnnnnnnnnnnnnnnnnnnnnnnnnnnnnnnnnnnnnnnnnnnnnnnnnnnnnnnnnnnnnnnnnnnnnnnnnnnnnnnnnnnnnnnnnnnnnnnnnnnnnnnnnnnnnnnnnnnnnnnnnnnnnnnnnnnnnnnnnnnnnnnnnnnnnnnnnnnnnnnnnnnnnnnnnnnnnnnnnnnnnnnnnnnnnnnnnnnnnnnnnnnnnnnnnnnnnnnnnnnnnnnnnnnnnnnnnnnnnnnnnnnnnnnnnnnnnnnnnnnnnnnnnnnnnnnnnnnnnnnnnnnnnnnnnnnnnnnnnnnnnnnnnnnnnnnnnnnnnnnnnnnnnnnnnnnnnnnnnnnnnnnnnnnnnnnnnnnnnnnnnnnnnnnnnnnnnnnnnnnnnnnnnnnnnnnnnnnnnnnnnnnnnnnnnnnnnnnnnnnnnnnnnnnnnnnnnnnnnnnnnnnnnnnnnnnnnnnnnnnnnnnnnnnnnnnnnnnnnnnnnnnnnnnnnnnnnnnnnnnnnnnnnnnnnnnnnnnnnnnnnnnnnnnnnnnnnnnnnnnnnnnnnnnnnnnnnnnnnnnnnnnnnnnnnnnnnnnnnnnnnnnnnnnnnnnnnnnnnnnnnnnnnnnnnnnnnnnnnnnnnnnnnnnnnnnnnnnnnnnnnnnnnnnnnnnnnnnnnnnnnnnnnnnnnnnnnnnnnnnnnnnnnnnnnnnnnnnnnnnnnnnnnnnnnnnnnnnnnnnnnnnnnnnnnnnnnnnnnnnnnnnnnnnnnnnnnnnnnnnnnnnnnnnnnnnnnnnnnnnnnnnnnnnnnnnnnnnnnnnnnnnnnnnnnnnnnnnnnnnnnnnnnnnnnnnnnnnnnnnnnnnnnnnnnnnnnnnnnnnnnnnnnnnnnnnnnnnnnnnnnnnnnnnnnnnnnnnnnnnnnnnnnnnnnnnnnnnnnnnnnnnnnnnnnnnnnnnnnnnnnnnnnnnnnnnnnnnnnnnnnnnnnnnnnnnnnnnnnnnnnnnnnnnnnnnnnnnnnnnnnnnnnnnnnnnnnnnnnnnnnnnnnnnnnnnnnnnnnnnnnnnnnnnnnnnnnnnnnnnnnnnnnnnnnnnnnnnnnnnnnnnnnnnnnnnnnnnnnnnnnnnnnnnnnnnnnnnnnnnnnnnnnnnnnnnnnnnnnnnnnnnnnnnnnnnnnnnnnnnnnnnnnnnnnnnnnnnnnnnnnnnnnnnnnnnnnnnnnnnnnnnnnnnnnnnnnnnnnnnnnnnnnnnnnnnnnnnnnnnnnnnnnnnnnnnnnnnnnnnnnnnnnnnnnnnnnnnnnnnnnnnnnnnnnnnnnnnnnnnnnnnnnnnnnnnnnnnnnnnnnnnnnnnnnnnnnnnnnnnnnnnnnnnnnnnnnnnnnnnnnnnnnnnnnnnnnnnnnnnnnnnnnnnnnnnnnnnnnnnnnnnnnnnnnnnnnnnnnnnnnnnnnnnnnnnnnnnnnnnnnnnnnnnnnnnnnnnnnnnnnnnnnnnnnnnnnnnnnnnnnnnnnnnnnnnnnnnnnnnnnnnnnnnnnnnnnnnnnnnnnnnnnnnnnnnnnnnnnnnnnnnnnnnnnnnnnnnnnnnnnnnnnnnnnnnnnnnnnnnnnnnnnnnnnnnnnnnnnnnnnnnnnnnnnnnnnnnnnnnnnnnnnnnnnnnnnnnnnnnnnnnnnnnnnnnnnnnnnnnnnnnnnnnnnnnnnnnnnnnnnnnnnnnnnnnnnnnnnnnnnnnnnnnnnnnnnnnnnnnnnnnnnnnnnnnnnnnnnnnnnnnnnnnnnnnnnnnnnnnnnnnnnnnnnnnnnnnnnnnnnnnnnnnnnnnnnnnnnnnnnnnnnnnnnnnnnnnnnnnnnnnnnnnnnnnnnnnnnnnnnnnnnnnnnnnnnnnnnnnnnnnnnnnnnnnnnnnnnnnnnnnnnnnnnnnnnnnnnnnnnnnnnnnnnnnnnnnnnnnnnnnnnnnnnnnnnnnnnnnnnnnnnnnnnnnnnnnnnnnnnnnnnnnnnnnnnnnnnnnnnnnnnnnnnnnnnnnnnnnnnnnnnnnnnnnnnnnnnnnnnnnnnnnnnnnnnnnnnnnnnnnnnnnnnnnnnnnnnnnnnnnnnnnnnnnnnnnnnnnnnnnnnnnnnnnnnnnnnnnnnnnnnnnnnnnnnnnnnnnnnnnnnnnnnnnnnnnnnnnnnnnnnnnnnnnnnnnnnnnnnnnnnnnnnnnnnnnnnnnnnnnnnnnnnnnnnnnnnnnnnnnnnnnnnnnnnnnnnnnnnnnnnnnnnnnnnnnnnnnnnnnnnnnnnnnnnnnnnnnnnnnnnnnnnnnnnnnnnnnnnnnnnnnnnnnnnnnnnnnnnnnnnnnnnnnnnnnnnnnnnnnnnnnnnnnnnnnnnnnnnnnnnnnnnnnnnnnnnnnnnnnnnnnnnnnnnnnnnnnnnnnnnnnnnnnnnnnnnnnnnnnnnnnnnnnnnnnnnnnnnnnnnnnnnnnnnnnnnnnnnnnnnnnnnnnnnnnnnnnnnnnnnnnnnnnnnnnnnnnnnnnnnnnnnnnnnnnnnnnnnnnnnnnnnnnnnnnnnnnnnnnnnnnnnnnnnnnnnnnnnnnnnnnnnnnnnnnnnnnnnnnnnnnnnnnnnnnnnnnnnnnnnnnnnnnnnnnnnnnnnnnnnnnnnnnnnnnnnnnnnnnnnnnnnnnnnnnnnnnnnnnnnnnnnnnnnnnnnnnnnnnnnnnnnnnnnnnnnnnnnnnnnnnnnnnnnnnnnnnnnnnnnnnnnnnnnnnnnnnnnnnnnnnnnnnnnnnnnnnnnnnnnnnnnnnnnnnnnnnnnnnnnnnnnnnnnnnnnnnnnnnnnnnnnnnnnnnnnnnnnnnnnnnnnnnnnnnnnnnnnnnnnnnnnnnnnnnnnnnnnnnnnnnnnnnnnnnnnnnnnnnnnnnnnnnnnnnnnnnnnnnnnnnnnnnnnnnnnnnnnnnnnnnnnnnnnnnnnnnnnnnnnnnnnnnnnnnnnnnnnnnnnnnnnnnnnnnnnnnnnnnnnnnnnnnnnnnnnnnnnnnnnnnnnnnnnnnnnnnnnnnnnnnnnnnnnnnnnnnnnnnnnnnnnnnnnnnnnnnnnnnnnnnnnnnnnnnnnnnnnnnnnnnnnnnnnnnnnnnnnnnnnnnnnnnnnnnnnnnnnnnnnnnnnnnnnnnnnnnnnnnnnnnnnnnnnnnnnnnnnnnnnnnnnnnnnnnnnnnnnnnnnnnnnnnnnnnnnnnnnnnnnnnnnnnnnnnnnnnnnnnnnnnnnnnnnnnnnnnnnnnnnnnnnnnnnnnnnnnnnnnnnnnnnnnnnnnnnnnnnnnnnnnnnnnnnnnnnnnnnnnnnnnnnnnnnnnnnnnnnnnnnnnnnnnnnnnnnnnnnnnnnnnnnnnnnnnnnnnnnnnnnnnnnnnnnnnnnnnnnnnnnnnnnnnnnnnnnnnnnnnnnnnnnnnnnnnnnnnnnnnnnnnnnnnnnnnnnnnnnnnnnnnnnnnnnnnnnnnnnnnnnnnnnnnnnnnnnnnnnnnnnnnnnnnnnnnnnnnnnnnnnnnnnnnnnnnnnnnnnnnnnnnnnnnnnnnnnnnnnnnnnnnnnnnnnnnnnnnnnnnnnnnnnnnnnnnnnnnnnnnnnnnnnnnnnnnnnnnnnnnnnnnnnnnnnnnnnnnnnnnnnnnnnnnnnnnnnnnnnnnnnnnnnnnnnnnnnnnnnnnnnnnnnnnnnnnnnnnnnnnnnnnnnnnnnnnnnnnnnnnnnnnnnnnnnnnnnnnnnnnnnnnnnnnnnnnnnnnnnnnnnnnnnnnnnnnnnnnnnnnnnnnnnnnnnnnnnnnnnnnnnnnnnnnnnnnnnnnnnnnnnnnnnnnnnnnnnnnnnnnnnnnnnnnnnnnnnnnnnnnnnnnnnnnnnnnnnnnnnnnnnnnnnnnnnnnnnnnnnnnnnnnnnnnnnnnnnnnnnnnnnnnnnnnnnnnnnnnnnnnnnnnnnnnnnnnnnnnnnnnnnnnnnnnnnnnnnnnnnnnnnnnnnnnnnnnnnnnnnnnnnnnnnnnnnnnnnnnnnnnnnnnnnnnnnnnnnnnnnnnnnnnnnnnnnnnnnnnnnnnnnnnnnnnnnnnnnnnnnnnnnnnnnnnnnnnnnnnnnnnnnnnnnnnnnnnnnnnnnnnnnnnnnnnnnnnnnnnnnnnnnnnnnnnnnnnnnnnnnnnnnnnnnnnnnnnnnnnnnnnnnnnnnnnnnnnnnnnnnnnnnnnnnnnnnnnnnnnnnnnnnnnnnnnnnnnnnnnnnnnnnnnnnnnnnnnnnnnnnnnnnnnnnnnnnnnnnnnnnnnnnnnnnnnnnnnnnnnnnnnnnnnnnnnnnnnnnnnnnnnnnnnnnnnnnnnnnnnnnnnnnnnnnnnnnnnnnnnnnnnnnnnnnnnnnnnnnnnnnnnnnnnnnnnnnnnnnnnnnnnnnnnnnnnnnnnnnnnnnnnnnnnnnnnnnnnnnnnnnnnnnnnnnnnnnnnnnnnnnnnnnnnnnnnnnnnnnnnnnnnnnnnnnnnnnnnnnnnnnnnnnnnnnnnnnnnnnnnnnnnnnnnnnnnnnnnnnnnnnnnnnnnnnnnnnnnnnnnnnnnnnnnnnnnnnnnnnnnnnnnnnnnnnnnnnnnnnnnnnnnnnnnnnnnnnnnnnnnnnnnnnnnnnnnnnnnnnnnnnnnnnnnnnnnnnnnnnnnnnnnnnnnnnnnnnnnnnnnnnnnnnnnnnnnnnnnnnnnnnnnnnnnnnnnnnnnnnnnnnnnnnnnnnnnnnnnnnnnnnnnnnnnnnnnnnnnnnnnnnnnnnnnnnnnnnnnnnnnnnnnnnnnnnnnnnnnnnnnnnnnnnnnnnnnnnnnnnnnnnnnnnnnnnnnnnnnnnnnnnnnnnnnnnnnnnnnnnnnnnnnnnnnnnnnnnnnnnnnnnnnnnnnnnnnnnnnnnnnnnnnnnnnnnnnnnnnnnnnnnnnnnnnnnnnnnnnnnnnnnnnnnnnnnnnnnnnnnnnnnnnnnnnnnnnnnnnnnnnnnnnnnnnnnnnnnnnnnnnnnnnnnnnnnnnnnnnnnnnnnnnnnnnnnnnnnnnnnnnnnnnnnnnnnnnnnnnnnnnnnnnnnnnnnnnnnnnnnnnnnnnnnnnnnnnnnnnnnnnnnnnnnnnnnnnnnnnnnnnnnnnnnnnnnnnnnnnnnnnnnnnnnnnnnnnnnnnnnnnnnnnnnnnnnnnnnnnnnnnnnnnnnnnnnnnnnnnnnnnnnnnnnnnnnnnnnnnnnnnnnnnnnnnnnnnnnnnnnnnnnnnnnnnnnnnnnnnnnnnnnnnnnnnnnnnnnnnnnnnnnnnnnnnnnnnnnnnnnnnnnnnnnnnnnnnnnnnnnnnnnnnnnnnnnnnnnnnnnnnnnnnnnnnnnnnnnnnnnnnnnnnnnnnnnnnnnnnnnnnnnnnnnnnnnnnnnnnnnnnnnnnnnnnnnnnnnnnnnnnnnnnnnnnnnnnnnnnnnnnnnnnnnnnnnnnnnnnnnnnnnnnnnnnnnnnnnnnnnnnnnnnnnnnnnnnnnnnnnnnnnnnnnnnnnnnnnnnnnnnnnnnnnnnnnnnnnnnnnnnnnnnnnnnnnnnnnnnnnnnnnnnnnnnnnnnnnnnnnnnnnnnnnnnnnnnnnnnnnnnnnnnnnnnnnnnnnnnnnnnnnnnnnnnnnnnnnnnnnnnnnnnnnnnnnnnnnnnnnnnnnnnnnnnnnnnnnnnnnnnnnnnnnnnnnnnnnnnnnnnnnnnnnnnnnnnnnnnnnnnnnnnnnnnnnnnnnnnnnnnnnnnnnnnnnnnnnnnnnnnnnnnnnnnnnnnnnnnnnnnnnnnnnnnnnnnnnnnnnnnnnnnnnnnnnnnnnnnnnnnnnnnnnnnnnnnnnnnnnnnnnnnnnnnnnnnnnnnnnnnnnnnnnnnnnnnnnnnnnnnnnnnnnnnnnnnnnnnnnnnnnnnnnnnnnnnnnnnnnnnnnnnnnnnnnnnnnnnnnnnnnnnnnnnnnnnnnnnnnnnnnnnnnnnnnnnnnnnnnnnnnnnnnnnnnnnnnnnnnnnnnnnnnnnnnnnnnnnnnnnnnnnnnnnnnnnnnnnnnnnnnnnnnnnnnnnnnnnnnnnnnnnnnnnnnnnnnnnnnnnnnnnnnnnnnnnnnnnnnnnnnnnnnnnnnnnnnnnnnnnnnnnnnnnnnnnnnnnnnnnnnnnnnnnnnnnnnnnnnnnnnnnnnnnnnnnnnnnnnnnnnnnnnnnnnnnnnnnnnnnnnnnnnnnnnnnnnnnnnnnnnnnnnnnnnnnnnnnnnnnnnnnnnnnnnnnnnnnnnnnnnnnnnnnnnnnnnnnnnnnnnnnnnnnnnnnnnnnnnnnnnnnnnnnnnnnnnnnnnnnnnnnnnnnnnnnnnnnnnnnnnnnnnnnnnnnnnnnnnnnnnnnnnnnnnnnnnnnnnnnnnnnnnnnnnnnnnnnnnnnnnnnnnnnnnnnnnnnnnnnnnnnnnnnnnnnnnnnnnnnnnnnnnnnnnnnnnnnnnnnnnnnnnnnnnnnnnnnnnnnnnnnnnnnnnnnnnnnnnnnnnnnnnnnnnnnnnnnnnnnnnnnnnnnnnnnnnnnnnnnnnnnnnnnnnnnnnnnnnnnnnnnnnnnnnnnnnnnnnnnnnnnnnnnnnnnnnnnnnnnnnnnnnnnnnnnnnnnnnnnnnnnnnnnnnnnnnnnnnnnnnnnnnnnnnnnnnnnnnnnnnnnnnnnnnnnnnnnnnnnnnnnnnnnnnnnnnnnnnnnnnnnnnnnnnnnnnnnnnnnnnnnnnnnnnnnnnnnnnnnnnnnnnnnnnnnnnnnnnnnnnnnnnnnnnnnnnnnnnnnnnnnnnnnnnnnnnnnnnnnnnnnnnnnnnnnnnnnnnnnnnnnnnnnnnnnnnnnnnnnnnnnnnnnnnnnnnnnnnnnnnnnnnnnnnnnnnnnnnnnnnnnnnnnnnnnnnnnnnnnnnnnnnnnnnnnnnnnnnnnnnnnnnnnnnnnnnnnnnnnnnnnnnnnnnnnnnnnnnnnnnnnnnnnnnnnnnnnnnnnnnnnnnnnnnnnnnnnnnnnnnnnnnnnnnnnnnnnnnnnnnnnnnnnnnnnnnnnnnnnnnnnnnnnnnnnnnnnnnnnnnnnnnnnnnnnnnnnnnnnnnnnnnnnnnnnnnnnnnnnnnnnnnnnnnnnnnnnnnnnnnnnnnnnnnnnnnnnnnnnnnnnnnnnnnnnnnnnnnnnnnnnnnnnnnnnnnnnnnnnnnnnnnnnnnnnnnnnnnnnnnnnnnnnnnnnnnnnnnnnnnnnnnnnnnnnnnnnnnnnnnnnnnnnnnnnnnnnnnnnnnnnnnnnnnnnnnnnnnnnnnnnnnnnnnnnnnnnnnnnnnnnnnnnnnnnnnnnnnnnnnnnnnnnnnnnnnnnnnnnnnnnnnnnnnnnnnnnnnnnnnnnnnnnnnnnnnnnnnnnnnnnnnnnnnnnnnnnnnnnnnnnnnnnnnnnnnnnnnnnnnnnnnnnnnnnnnnnnnnnnnnnnnnnnnnnnnnnnnnnnnnnnnnnnnnnnnnnnnnnnnnnnnnnnnnnnnnnnnnnnnnnnnnnnnnnnnnnnnnnnnnnnnnnnnnnnnnnnnnnnnnnnnnnnnnnnnnnnnnnnnnnnnnnnnnnnnnnnnnnnnnnnnnnnnnnnnnnnnnnnnnnnnnnnnnnnnnnnnnnnnnnnnnnnnnnnnnnnnnnnnnnnnnnnnnnnnnnnnnnnnnnnnnnnnnnnnnnnnnnnnnnnnnnnnnnnnnnnnnnnnnnnnnnnnnnnnnnnnnnnnnnnnnnnnnnnnnnnnnnnnnnnnnnnnnnnnnnnnnnnnnnnnnnnnnnnnnnnnnnnnnnnnnnnnnnnnnnnnnnnnnnnnnnnnnnnnnnnnnnnnnnnnnnnnnnnnnnnnnnnnnnnnnnnnnnnnnnnnnnnnnnnnnnnnnnnnnnnnnnnnnnnnnnnnnnnnnnnnnnnnnnnnnnnnnnnnnnnnnnnnnnnnnnnnnnnnnnnnnnnnnnnnnnnnnnnnnnnnnnnnnnnnnnnnnnnnnnnnnnnnnnnnnnnnnnnnnnnnnnnnnnnnnnnnnnnnnnnnnnnnnnnnnnnnnnnnnnnnnnnnnnnnnnnnnnnnnnnnnnnnnnnnnnnnnnnnnnnnnnnnnnnnnnnnnnnnnnnnnnnnnnnnnnnnnnnnnnnnnnnnnnnnnnnnnnnnnnnnnnnnnnnnnnnnnnnnnnnnnnnnnnnnnnnnnnnnnnnnnnnnnnnnnnnnnnnnnnnnnnnnnnnnnnnnnnnnnnnnnnnnnnnnnnnnnnnnnnnnnnnnnnnnnnnnnnnnnnnnnnnnnnnnnnnnnnnnnnnnnnnnnnnnnnnnnnnnnnnnnnnnnnnnnnnnnnnnnnnnnnnnnnnnnnnnnnnnnnnnnnnnnnnnnnnnnnnnnnnnnnnnnnnnnnnnnnnnnnnnnnnnnnnnnnnnnnnnnnnnnnnnnnnnnnnnnnnnnnnnnnnnnnnnnnnnnnnnnnnnnnnnnnnnnnnnnnnnnnnnnnnnnnnnnnnnnnnnnnnnnnnnnnnnnnnnnnnnnnnnnnnnnnnnnnnnnnnnnnnnnnnnnnnnnnnnnnnnnnnnnnnnnnnnnnnnnnnnnnnnnnnnnnnnnnnnnnnnnnnnnnnnnnnnnnnnnnnnnnnnnnnnnnnnnnnnnnnnnnnnnnnnnnnnnnnnnnnnnnnnnnnnnnnnnnnnnnnnnnnnnnnnnnnnnnnnnnnnnnnnnnnnnnnnnnnnnnnnnnnnnnnnnnnnnnnnnnnnnnnnnnnnnnnnnnnnnnnnnnnnnnnnnnnnnnnnnnnnnnnnnnnnnnnnnnnnnnnnnnnnnnnnnnnnnnnnnnnnnnnnnnnnnnnnnnnnnnnnnnnnnnnnnnnnnnnnnnnnnnnnnnnnnnnnnnnnnnnnnnnnnnnnnnnnnnnnnnnnnnnnnnnnnnnnnnnnnnnnnnnnnnnnnnnnnnnnnnnnnnnnnnnnnnnnnnnnnnnnnnnnnnnnnnnnnnnnnnnnnnnnnnnnnnnnnnnnnnnnnnnnnnnnnnnnnnnnnnnnnnnnnnnnnnnnnnnnnnnnnnnnnnnnnnnnnnnnnnnnnnnnnnnnnnnnnnnnnnnnnnnnnnnnnnnnnnnnnnnnnnnnnnnnnnnnnnnnnnnnnnnnnnnnnnnnnnnnnnnnnnnnnnnnnnnnnnnnnnnnnnnnnnnnnnnnnnnnnnnnnnnnnnnnnnnnnnnnnnnnnnnnnnnnnnnnnnnnnnnnnnnnnnnnnnnnnnnnnnnnnnnnnnnnnnnnnnnnnnnnnnnnnnnnnnnnnnnnnnnnnnnnnnnnnnnnnnnnnnnnnnnnnnnnnnnnnnnnnnnnnnnnnnnnnnnnnnnnnnnnnnnnnnnnnnnnnnnnnnnnnnnnnnnnnnnnnnnnnnnnnnnnnnnnnnnnnnnnnnnnnnnnnnnnnnnnnnnnnnnnnnnnnnnnnnnnnnnnnnnnnnnnnnnnnnnnnnnnnnnnnnnnnnnnnnnnnnnnnnnnnnnnnnnnnnnnnnnnnnnnnnnnnnnnnnnnnnnnnnnnnnnnnnnnnnnnnnnnnnnnnnnnnnnnnnnnnnnnnnnnnnnnnnnnnnnnnnnnnnnnnnnnnnnnnnnnnnnnnnnnnnnnnnnnnnnnnnnnnnnnnnnnnnnnnnnnnnnnnnnnnnnnnnnnnnnnnnnnnnnnnnnnnnnnnnnnnnnnnnnnnnnnnnnnnnnnnnnnnnnnnnnnnnnnnnnnnnnnnnnnnnnnnnnnnnnnnnnnnnnnnnnnnnnnnnnnnnnnnnnnnnnnnnnnnnnnnnnnnnnnnnnnnnnnnnnnnnnnnnnnnnnnnnnnnnnnnnnnnnnnnnnnnnnnnnnnnnnnnnnnnnnnnnnnnnnnnnnnnnnnnnnnnnnnnnnnnnnnnnnnnnnnnnnnnnnnnnnnnnnnnnnnnnnnnnnnnnnnnnnnnnnnnnnnnnnnnnnnnnnnnnnnnnnnnnnnnnnnnnnnnnnnnnnnnnnnnnnnnnnnnnnnnnnnnnnnnnnnnnnnnnnnnnnnnnnnnnnnnnnnnnnnnnnnnnnnnnnnnnnnnnnnnnnnnnnnnnnnnnnnnnnnnnnnnnnnnnnnnnnnnnnnnnnnnnnnnnnnnnnnnnnnnnnnnnnnnnnnnnnnnnnnnnnnnnnnnnnnnnnnnnnnnnnnnnnnnnnnnnnnnnnnnnnnnnnnnnnnnnnnnnnnnnnnnnnnnnnnnnnnnnnnnnnnnnnnnnnnnnnnnnnnnnnnnnnnnnnnnnnnnnnnnnnnnnnnnnnnnnnnnnnnnnnnnnnnnnnnnnnnnnnnnnnnnnnnnnnnnnnnnnnnnnnnnnnnnnnnnnnnnnnnnnnnnnnnnnnnnnnnnnnnnnnnnnnnnnnnnnnnnnnnnnnnnnnnnnnnnnnnnnnnnnnnnnnnnnnnnnnnnnnnnnnnnnnnnnnnnnnnnnnnnnnnnnnnnnnnnnnnnnnnnnnnnnnnnnnnnnnnnnnnnnnnnnnnnnnnnnnnnnnnnnnnnnnnnnnnnnnnnnnnnnnnnnnnnnnnnnnnnnnnnnnnnnnnnnnnnnnnnnnnnnnnnnnnnnnnnnnnnnnnnnnnnnnnnnnnnnnnnnnnnnnnnnnnnnnnnnnnnnnnnnnnnnnnnnnnnnnnnnnnnnnnnnnnnnnnnnnnnnnnnnnnnnnnnnnnnnnnnnnnnnnnnnnnnnnnnnnnnnnnnnnnnnnnnnnnnnnnnnnnnnnnnnnnnnnnnnnnnnnnnnnnnnnnnnnnnnnnnnnnnnnnnnnnnnnnnnnnnnnnnnnnnnnnnnnnnnnnnnnnnnnnnnnnnnnnnnnnnnnnnnnnnnnnnnnnnnnnnnnnnnnnnnnnnnnnnnnnnnnnnnnnnnnnnnnnnnnnnnnnnnnnnnnnnnnnnnnnnnnnnnnnnnnnnnnnnnnnnnnnnnnnnnnnnnnnnnnnnnnnnnnnnnnnnnnnnnnnnnnnnnnnnnnnnnnnnnnnnnnnnnnnnnnnnnnnnnnnnnnnnnnnnnnnnnnnnnnnnnnnnnnnnnnnnnnnnnnnnnnnnnnnnnnnnnnnnnnnnnnnnnnnnnnnnnnnnnnnnnnnnnnnnnnnnnnnnnnnnnnnnnnnnnnnnnnnnnnnnnnnnnnnnnnnnnnnnnnnnnnnnnnnnnnnnnnnnnnnnnnnnnnnnnnnnnnnnnnnnnnnnnnnnnnnnnnnnnnnnnnnnnnnnnnnnnnnnnnnnnnnnnnnnnnnnnnnnnnnnnnnnnnnnnnnnnnnnnnnnnnnnnnnnnnnnnnnnnnnnnnnnnnnnnnnnnnnnnnnnnnnnnnnnnnnnnnnnnnnnnnnnnnnnnnnnnnnnnnnnnnnnnnnnnnnnnnnnnnnnnnnnnnnnnnnnnnnnnnnnnnnnnnnnnnnnnnnnnnnnnnnnnnnnnnnnnnnnnnnnnnnnnnnnnnnnnnnnnnnnnnnnnnnnnnnnnnnnnnnnnnnnnnnnnnnnnnnnnnnnnnnnnnnnnnnnnnnnnnnnnnnnnnnnnnnnnnnnnnnnnnnnnnnnnnnnnnnnnnnnnnnnnnnnnnnnnnnnnnnnnnnnnnnnnnnnnnnnnnnnnnnnnnnnnnnnnnnnnnnnnnnnnnnnnnnnnnnnnnnnnnnnnnnnnnnnnnnnnnnnnnnnnnnnnnnnnnnnnnnnnnnnnnnnnnnnnnnnnnnnnnnnnnnnnnnnnnnnnnnnnnnnnnnnnnnnnnnnnnnnnnnnnnnnnnnnnnnnnnnnnnnnnnnnnnnnnnnnnnnnnnnnnnnnnnnnnnnnnnnnnnnnnnnnnnnnnnnnnnnnnnnnnnnnnnnnnnnnnnnnnnnnnnnnnnnnnnnnnnnnnnnnnnnnnnnnnnnnnnnnnnnnnnnnnnnnnnnnnnnnnnnnnnnnnnnnnnnnnnnnnnnnnnnnnnnnnnnnnnnnnnnnnnnnnnnnnnnnnnnnnnnnnnnnnnnnnnnnnnnnnnnnnnnnnnnnnnnnnnnnnnnnnnnnnnnnnnnnnnnnnnnnnnnnnnnnnnnnnnnnnnnnnnnnnnnnnnnnnnnnnnnnnnnnnnnnnnnnnnnnnnnnnnnnnnnnnnnnnnnnnnnnnnnnnnnnnnnnnnnnnnnnnnnnnnnnnnnnnnnnnnnnnnnnnnnnnnnnnnnnnnnnnnnnnnnnnnnnnnnnnnnnnnnnnnnnnnnnnnnnnnnnnnnnnnnnnnnnnnnnnnnnnnnnnnnnnnnnnnnnnnnnnnnnnnnnnnnnnnnnnnnnnnnnnnnnnnnnnnnnnnnnnnnnnnnnnnnnnnnnnnnnnnnnnnnnnnnnnnnnnnnnnnnnnnnnnnnnnnnnnnnnnnnnnnnnnnnnnnnnnnnnnnnnnnnnnnnnnnnnnnnnnnnnnnnnnnnnnnnnnnnnnnnnnnnnnnnnnnnnnnnnnnnnnnnnnnnnnnnnnnnnnnnnnnnnnnnnnnnnnnnnnnnnnnnnnnnnnnnnnnnnnnnnnnnnnnnnnnnnnnnnnnnnnnnnnnnnnnnnnnnnnnnnnnnnnnnnnnnnnnnnnnnnnnnnnnnnnnnnnnnnnnnnnnnnnnnnnnnnnnnnnnnnnnnnnnnnnnnnnnnnnnnnnnnnnnnnnnnnnnnnnnnnnnnnnnnnnnnnnnnnnnnnnnnnnnnnnnnnnnnnnnnnnnnnnnnnnnnnnnnnnnnnnnnnnnnnnnnnnnnnnnnnnnnnnnnnnnnnnnnnnnnnnnnnnnnnnnnnnnnnnnnnnnnnnnnnnnnnnnnnnnnnnnnnnnnnnnnnnnnnnnnnnnnnnnnnnnnnnnnnnnnnnnnnnnnnnnnnnnnnnnnnnnnnnnnnnnnnnnnnnnnnnnnnnnnnnnnnnnnnnnnnnnnnnnnnnnnnnnnnnnnnnnnnnnnnnnnnnnnnnnnnnnnnnnnnnnnnnnnnnnnnnnnnnnnnnnnnnnnnnnnnnnnnnnnnnnnnnnnnnnnnnnnnnnnnnnnnnnnnnnnnnnnnnnnnnnnnnnnnnnnnnnnnnnnnnnnnnnnnnnnnnnnnnnnnnnnnnnnnnnnnnnnnnnnnnnnnnnnnnnnnnnnnnnnnnnnnnnnnnnnnnnnnnnnnnnnnnnnnnnnnnnnnnnnnnnnnnnnnnnnnnnnnnnnnnnnnnnnnnnnnnnnnnnnnnnnnnnnnnnnnnnnnnnnnnnnnnnnnnnnnnnnnnnnnnnnnnnnnnnnnnnnnnnnnnnnnnnnnnnnnnnnnnnnnnnnnnnnnnnnnnnnnnnnnnnnnnnnnnnnnnnnnnnnnnnnnnnnnnnnnnnnnnnnnnnnnnnnnnnnnnnnnnnnnnnnnnnnnnnnnnnnnnnnnnnnnnnnnnnnnnnnnnnnnnnnnnnnnnnnnnnnnnnnnnnnnnnnnnnnnnnnnnnnnnnnnnnnnnnnnnnnnnnnnnnnnnnnnnnnnnnnnnnnnnnnnnnnnnnnnnnnnnnnnnnnnnnnnnnnnnnnnnnnnnnnnnnnnnnnnnnnnnnnnnnnnnnnnnnnnnnnnnnnnnnnnnnnnnnnnnnnnnnnnnnnnnnnnnnnnnnnnnnnnnnnnnnnnnnnnnnnnnnnnnnnnnnnnnnnnnnnnnnnnnnnnnnnnnnnnnnnnnnnnnnnnnnnnnnnnnnnnnnnnnnnnnnnnnnnnnnnnnnnnnnnnnnnnnnnnnnnnnnnnnnnnnnnnnnnnnnnnnnnnnnnnnnnnnnnnnnnnnnnnnnnnnnnnnnnnnnnnnnnnnnnnnnnnnnnnnnnnnnnnnnnnnnnnnnnnnnnnnnnnnnnnnnnnnnnnnnnnnnnnnnnnnnnnnnnnnnnnnnnnnnnnnnnnnnnnnnnnnnnnnnnnnnnnnnnnnnnnnnnnnnnnnnnnnnnnnnnnnnnnnnnnnnnnnnnnnnnnnnnnnnnnnnnnnnnnnnnnnnnnnnnnnnnnnnnnnnnnnnnnnnnnnnnnnnnnnnnnnnnnnnnnnnnnnnnnnnnnnnnnnnnnnnnnnnnnnnnnnnnnnnnnnnnnnnnnnnnnnnnnnnnnnnnnnnnnnnnnnnnnnnnnnnnnnnnnnnnnnnnnnnnnnnnnnnnnnnnnnnnnnnnnnnnnnnnnnnnnnnnnnnnnnnnnnnnnnnnnnnnnnnnnnnnnnnnnnnnnnnnnnnnnnnnnnnnnnnnnnnnnnnnnnnnnnnnnnnnnnnnnnnnnnnnnnnnnnnnnnnnnnnnnnnnnnnnnnnnnnnnnnnnnnnnnnnnnnnnnnnnnnnnnnnnnnnnnnnnnnnnnnnnnnnnnnnnnnnnnnnnnnnnnnnnnnnnnnnnnnnnnnnnnnnnnnnnnnnnnnnnnnnnnnnnnnnnnnnnnnnnnnnnnnnnnnnnnnnnnnnnnnnnnnnnnnnnnnnnnnnnnnnnnnnnnnnnnnnnnnnnnnnnnnnnnnnnnnnnnnnnnnnnnnnnnnnnnnnnnnnnnnnnnnnnnnnnnnnnnnnnnnnnnnnnnnnnnnnnnnnnnnnnnnnnnnnnnnnnnnnnnnnnnnnnnnnnnnnnnnnnnnnnnnnnnnnnnnnnnnnnnnnnnnnnnnnnnnnnnnnnnnnnnnnnnnnnnnnnnnnnnnnnnnnnnnnnnnnnnnnnnnnnnnnnnnnnnnnnnnnnnnnnnnnnnnnnnnnnnnnnnnnnnnnnnnnnnnnnnnnnnnnnnnnnnnnnnnnnnnnnnnnnnnnnnnnnnnnnnnnnnnnnnnnnnnnnnnnnnnnnnnnnnnnnnnnnnnnnnnnnnnnnnnnnnnnnnnnnnnnnnnnnnnnnnnnnnnnnnnnnnnnnnnnnnnnnnnnnnnnnnnnnnnnnnnnnnnnnnnnnnnnnnnnnnnnnnnnnnnnnnnnnnnnnnnnnnnnnnnnnnnnnnnnnnnnnnnnnnnnnnnnnnnnnnnnnnnnnnnnnnnnnnnnnnnnnnnnnnnnnnnnnnnnnnnnnnnnnnnnnnnnnnnnnnnnnnnnnnnnnnnnnnnnnnnnnnnnnnnnnnnnnnnnnnnnnnnnnnnnnnnnnnnnnnnnnnnnnnnnnnnnnnnnnnnnnnnnnnnnnnnnnnnnnnnnnnnnnnnnnnnnnnnnnnnnnnnnnnnnnnnnnnnnnnnnnnnnnnnnnnnnnnnnnnnnnnnnnnnnnnnnnnnnnnnnnnnnnnnnnnnnnnnnnnnnnnnnnnnnnnnnnnnnnnnnnnnnnnnnnnnnnnnnnnnnnnnnnnnnnnnnnnnnnnnnnnnnnnnnnnnnnnnnnnnnnnnnnnnnnnnnnnnnnnnnnnnnnnnnnnnnnnnnnnnnnnnnnnnnnnnnnnnnnnnnnnnnnnnnnnnnnnnnnnnnnnnnnnnnnnnnnnnnnnnnnnnnnnnnnnnnnnnnnnnnnnnnnnnnnnnnnnnnnnnnnnnnnnnnnnnnnnnnnnnnnnnnnnnnnnnnnnnnnnnnnnnnnnnnnnnnnnnnnnnnnnnnnnnnnnnnnnnnnnnnnnnnnnnnnnnnnnnnnnnnnnnnnnnnnnnnnnnnnnnnnnnnnnnnnnnnnnnnnnnnnnnnnnnnnnnnnnnnnnnnnnnnnnnnnnnnnnnnnnnnnnnnnnnnnnnnnnnnnnnnnnnnnnnnnnnnnnnnnnnnnnnnnnnnnnnnnnnnnnnnnnnnnnnnnnnnnnnnnnnnnnnnnnnnnnnnnnnnnnnnnnnnnnnnnnnnnnnnnnnnnnnnnnnnnnnnnnnnnnnnnnnnnnnnnnnnnnnnnnnnnnnnnnnnnnnnnnnnnnnnnnnnnnnnnnnnnnnnnnnnnnnnnnnnnnnnnnnnnnnnnnnnnnnnnnnnnnnnnnnnnnnnnnnnnnnnnnnnnnnnnnnnnnnnnnnnnnnnnnnnnnnnnnnnnnnnnnnnnnnnnnnnnnnnnnnnnnnnnnnnnnnnnnnnnnnnnnnnnnnnnnnnnnnnnnnnnnnnnnnnnnnnnnnnnnnnnnnnnnnnnnnnnnnnnnnnnnnnnnnnnnnnnnnnnnnnnnnnnnnnnnnnnnnnnnnnnnnnnnnnnnnnnnnnnnnnnnnnnnnnnnnnnnnnnnnnnnnnnnnnnnnnnnnnnnnnnnnnnnnnnnnnnnnnnnnnnnnnnnnnnnnnnnnnnnnnnnnnnnnnnnnnnnnnnnnnnnnnnnnnnnnnnnnnnnnnnnnnnnnnnnnnnnnnnnnnnnnnnnnnnnnnnnnnnnnnnnnnnnnnnnnnnnnnnnnnnnnnnnnnnnnnnnnnnnnnnnnnnnnnnnnnnnnnnnnnnnnnnnnnnnnnnnnnnnnnnnnnnnnnnnnnnnnnnnnnnnnnnnnnnnnnnnnnnnnnnnnnnnnnnnnnnnnnnnnnnnnnnnnnnnnnnnnnnnnnnnnnnnnnnnnnnnnnnnnnnnnnnnnnnnnnnnnnnnnnnnnnnnnnnnnnnnnnnnnnnnnnnnnnnnnnnnnnnnnnnnnnnnnnnnnnnnnnnnnnnnnnnnnnnnnnnnnnnnnnnnnnnnnnnnnnnnnnnnnnnnnnnnnnnnnnnnnnnnnnnnnnnnnnnnnnnnnnnnnnnnnnnnnnnnnnnnnnnnnnnnnnnnnnnnnnnnnnnnnnnnnnnnnnnnnnnnnnnnnnnnnnnnnnnnnnnnnnnnnnnnnnnnnnnnnnnnnnnnnnnnnnnnnnnnnnnnnnnnnnnnnnnnnnnnnnnnnnnnnnnnnnnnnnnnnnnnnnnnnnnnnnnnnnnnnnnnnnnnnnnnnnnnnnnnnnnnnnnnnnnnnnnnnnnnnnnnnnnnnnnnnnnnnnnnnnnnnnnnnnnnnnnnnnnnnnnnnnnnnnnnnnnnnnnnnnnnnnnnnnnnnnnnnnnnnnnnnnnnnnnnnnnnnnnnnnnnnnnnnnnnnnnnnnnnnnnnnnnnnnnnnnnnnnnnnnnnnnnnnnnnnnnnnnnnnnnnnnnnnnnnnnnnnnnnnnnnnnnnnnnnnnnnnnnnnnnnnnnnnnnnnnnnnnnnnnnnnnnnnnnnnnnnnnnnnnnnnnnnnnnnnnnnnnnnnnnnnnnnnnnnnnnnnnnnnnnnnnnnnnnnnnnnnnnnnnnnnnnnnnnnnnnnnnnnnnnnnnnnnnnnnnnnnnnnnnnnnnnnnnnnnnnnnnnnnnnnnnnnnnnnnnnnnnnnnnnnnnnnnnnnnnnnnnnnnnnnnnnnnnnnnnnnnnnnnnnnnnnnnnnnnnnnnnnnnnnnnnnnnnnnnnnnnnnnnnnnnnnnnnnnnnnnnnnnnnnnnnnnnnnnnnnnnnnnnnnnnnnnnnnnnnnnnnnnnnnnnnnnnnnnnnnnnnnnnnnnnnnnnnnnnnnnnnnnnnnnnnnnnnnnnnnnnnnnnnnnnnnnnnnnnnnnnnnnnnnnnnnnnnnnnnnnnnnnnnnnnnnnnnnnnnnnnnnnnnnnnnnnnnnnnnnnnnnnnnnnnnnnnnnnnnnnnnnnnnnnnnnnnnnnnnnnnnnnnnnnnnnnnnnnnnnnnnnnnnnnnnnnnnnnnnnnnnnnnnnnnnnnnnnnnnnnnnnnnnnnnnnnnnnnnnnnnnnnnnnnnnnnnnnnnnnnnnnnnnnnnnnnnnnnnnnnnnnnnnnnnnnnnnnnnnnnnnnnnnnnnnnnnnnnnnnnnnnnnnnnnnnnnnnnnnnnnnnnnnnnnnnnnnnnnnnnnnnnnnnnnnnnnnnnnnnnnnnnnnnnnnnnnnnnnnnnnnnnnnnnnnnnnnnnnnnnnnnnnnnnnnnnnnnnnnnnnnnnnnnnnnnnnnnnnnnnnnnnnnnnnnnnnnnnnnnnnnnnnnnnnnnnnnnnnnnnnnnnnnnnnnnnnnnnnnnnnnnnnnnnnnnnnnnnnnnnnnnnnnnnnnnnnnnnnnnnnnnnnnnnnnnnnnnnnnnnnnnnnnnnnnnnnnnnnnnnnnnnnnnnnnnnnnnnnnnnnnnnnnnnnnnnnnnnnnnnnnnnnnnnnnnnnnnnnnnnnnnnnnnnnnnnnnnnnnnnnnnnnnnnnnnnnnnnnnnnnnnnnnnnnnnnnnnnnnnnnnnnnnnnnnnnnnnnnnnnnnnnnnnnnnnnnnnnnnnnnnnnnnnnnnnnnnnnnnnnnnnnnnnnnnnnnnnnnnnnnnnnnnnnnnnnnnnnnnnnnnnnnnnnnnnnnnnnnnnnnnnnnnnnnnnnnnnnnnnnnnnnnnnnnnnnnnnnnnnnnnnnnnnnnnnnnnnnnnnnnnnnnnnnnnnnnnnnnnnnnnnnnnnnnnnnnnnnnnnnnnnnnnnnnnnnnnnnnnnnnnnnnnnnnnnnnnnnnnnnnnnnnnnnnnnnnnnnnnnnnnnnnnnnnnnnnnnnnnnnnnnnnnnnnnnnnnnnnnnnnnnnnnnnnnnnnnnnnnnnnnnnnnnnnnnnnnnnnnnnnnnnnnnnnnnnnnnnnnnnnnnnnnnnnnnnnnnnnnnnnnnnnnnnnnnnnnnnnnnnnnnnnnnnnnnnnnnnnnnnnnnnnnnnnnnnnnnnnnnnnnnnnnnnnnnnnnnnnnnnnnnnnnnnnnnnnnnnnnnnnnnnnnnnnnnnnnnnnnnnnnnnnnnnnnnnnnnnnnnnnnnnnnnnnnnnnnnnnnnnnnnnnnnnnnnnnnnnnnnnnnnnnnnnnnnnnnnnnnnnnnnnnnnnnnnnnnnnnnnnnnnnnnnnnnnnnnnnnnnnnnnnnnnnnnnnnnnnnnnnnnnnnnnnnnnnnnnnnnnnnnnnnnnnnnnnnnnnnnnnnnnnnnnnnnnnnnnnnnnnnnnnnnnnnnnnnnnnnnnnnnnnnnnnnnnnnnnnnnnnnnnnnnnnnnnnnnnnnnnnnnnnnnnnnnnnnnnnnnnnnnnnnnnnnnnnnnnnnnnnnnnnnnnnnnnnnnnnnnnnnnnnnnnnnnnnnnnnnnnnnnnnnnnnnnnnnnnnnnnnnnnnnnnnnnnnnnnnnnnnnnnnnnnnnnnnnnnnnnnnnnnnnnnnnnnnnnnnnnnnnnnnnnnnnnnnnnnnnnnnnnnnnnnnnnnnnnnnnnnnnnnnnnnnnnnnnnnnnnnnnnnnnnnnnnnnnnnnnnnnnnnnnnnnnnnnnnnnnnnnnnnnnnnnnnnnnnnnnnnnnnnnnnnnnnnnnnnnnnnnnnnnnnnnnnnnnnnnnnnnnnnnnnnnnnnnnnnnnnnnnnnnnnnnnnnnnnnnnnnnnnnnnnnnnnnnnnnnnnnnnnnnnnnnnnnnnnnnnnnnnnnnnnnnnnnnnnnnnnnnnnnnnnnnnnnnnnnnnnnnnnnnnnnnnnnnnnnnnnnnnnnnnnnnnnnnnnnnnnnnnnnnnnnnnnnnnnnnnnnnnnnnnnnnnnnnnnnnnnnnnnnnnnnnnnnnnnnnnnnnnnnnnnnnnnnnnnnnnnnnnnnnnnnnnnnnnnnnnnnnnnnnnnnnnnnnnnnnnnnnnnnnnnnnnnnnnnnnnnnnnnnnnnnnnnnnnnnnnnnnnnnnnnnnnnnnnnnnnnnnnnnnnnnnnnnnnnnnnnnnnnnnnnnnnnnnnnnnnnnnnnnnnnnnnnnnnnnnnnnnnnnnnnnnnnnnnnnnnnnnnnnnnnnnnnnnnnnnnnnnnnnnnnnnnnnnnnnnnnnnnnnnnnnnnnnnnnnnnnnnnnnnnnnnnnnnnnnnnnnnnnnnnnnnnnnnnnnnnnnnnnnnnnnnnnnnnnnnnnnnnnnnnnnnnnnnnnnnnnnnnnnnnnnnnnnnnnnnnnnnnnnnnnnnnnnnnnnnnnnnnnnnnnnnnnnnnnnnnnnnnnnnnnnnnnnnnnnnnnnnnnnnnnnnnnnnnnnnnnnnnnnnnnnnnnnnnnnnnnnnnnnnnnnnnnnnnnnnnnnnnnnnnnnnnnnnnnnnnnnnnnnnnnnnnnnnnnnnnnnnnnnnnnnnnnnnnnnnnnnnnnnnnnnnnnnnnnnnnnnnnnnnnnnnnnnnnnnnnnnnnnnnnnnnnnnnnnnnnnnnnnnnnnnnnnnnnnnnnnnnnnnnnnnnnnnnnnnnnnnnnnnnnnnnnnnnnnnnnnnnnnnnnnnnnnnnnnnnnnnnnnnnnnnnnnnnnnnnnnnnnnnnnnnnnnnnnnnnnnnnnnnnnnnnnnnnnnnnnnnnnnnnnnnnnnnnnnnnnnnnnnnnnnnnnnnnnnnnnnnnnnnnnnnnnnnnnnnnnnnnnnnnnnnnnnnnnnnnnnnnnnnnnnnnnnnnnnnnnnnnnnnnnnnnnnnnnnnnnnnnnnnnnnnnnnnnnnnnnnnnnnnnnnnnnnnnnnnnnnnnnnnnnnnnnnnnnnnnnnnnnnnnnnnnnnnnnnnnnnnnnnnnnnnnnnnnnnnnnnnnnnnnnnnnnnnnnnnnnnnnnnnnnnnnnnnnnnnnnnnnnnnnnnnnnnnnnnnnnnnnnnnnnnnnnnnnnnnnnnnnnnnnnnnnnnnnnnnnnnnnnnnnnnnnnnnnnnnnnnnnnnnnnnnnnnnnnnnnnnnnnnnnnnnnnnnnnnnnnnnnnnnnnnnnnnnnnnnnnnnnnnnnnnnnnnnnnnnnnnnnnnnnnnnnnnnnnnnnnnnnnnnnnnnnnnnnnnnnnnnnnnnnnnnnnnnnnnnnnnnnnnnnnnnnnnnnnnnnnnnnnnnnnnnnnnnnnnnnnnnnnnnnnnnnnnnnnnnnnnnnnnnnnnnnnnnnnnnnnnnnnnnnnnnnnnnnnnnnnnnnnnnnnnnnnnnnnnnnnnnnnnnnnnnnnnnnnnnnnnnnnnnnnnnnnnnnnnnnnnnnnnnnnnnnnnnnnnnnnnnnnnnnnnnnnnnnnnnnnnnnnnnnnnnnnnnnnnnnnnnnnnnnnnnnnnnnnnnnnnnnnnnnnnnnnnnnnnnnnnnnnnnnnnnnnnnnnnnnnnnnnnnnnnnnnnnnnnnnnnnnnnnnnnnnnnnnnnnnnnnnnnnnnnnnnnnnnnnnnnnnnnnnnnnnnnnnnnnnnnnnnnnnnnnnnnnnnnnnnnnnnnnnnnnnnnnnnnnnnnnnnnnnnnnnnnnnnnnnnnnnnnnnnnnnnnnnnnnnnnnnnnnnnnnnnnnnnnnnnnnnnnnnnnnnnnnnnnnnnnnnnnnnnnnnnnnnnnnnnnnnnnnnnnnnnnnnnnnnnnnnnnnnnnnnnnnnnnnnnnnnnnnnnnnnnnnnnnnnnnnnnnnnnnnnnnnnnnnnnnnnnnnnnnnnnnnnnnnnnnnnnnnnnnnnnnnnnnnnnnnnnnnnnnnnnnnnnnnnnnnnnnnnnnnnnnnnnnnnnnnnnnnnnnnnnnnnnnnnnnnnnnnnnnnnnnnnnnnnnnnnnnnnnnnnnnnnnnnnnnnnnnnnnnnnnnnnnnnnnnnnnnnnnnnnnnnnnnnnnnnnnnnnnnnnnnnnnnnnnnnnnnnnnnnnnnnnnnnnnnnnnnnnnnnnnnnnnnnnnnnnnnnnnnnnnnnnnnnnnnnnnnnnnnnnnnnnnnnnnnnnnnnnnnnnnnnnnnnnnnnnnnnnnnnnnnnnnnnnnnnnnnnnnnnnnnnnnnnnnnnnnnnnnnnnnnnnnnnnnnnnnnnnnnnnnnnnnnnnnnnnnnnnnnnnnnnnnnnnnnnnnnnnnnnnnnnnnnnnnnnnnnnnnnnnnnnnnnnnnnnnnnnnnnnnnnnnnnnnnnnnnnnnnnnnnnnnnnnnnnnnnnnnnnnnnnnnnnnnnnnnnnnnnnnnnnnnnnnnnnnnnnnnnnnnnnnnnnnnnnnnnnnnnnnnnnnnnnnnnnnnnnnnnnnnnnnnnnnnnnnnnnnnnnnnnnnnnnnnnnnnnnnnnnnnnnnnnnnnnnnnnnnnnnnnnnnnnnnnnnnnnnnnnnnnnnnnnnnnnnnnnnnnnnnnnnnnnnnnnnnnnnnnnnnnnnnnnnnnnnnnnnnnnnnnnnnnnnnnnnnnnnnnnnnnnnnnnnnnnnnnnnnnnnnnnnnnnnnnnnnnnnnnnnnnnnnnnnnnnnnnnnnnnnnnnnnnnnnnnnnnnnnnnnnnnnnnnnnnnnnnnnnnnnnnnnnnnnnnnnnnnnnnnnnnnnnnnnnnnnnnnnnnnnnnnnnnnnnnnnnnnnnnnnnnnnnnnnnnnnnnnnnnnnnnnnnnnnnnnnnnnnnnnnnnnnnnnnnnnnnnnnnnnnnnnnnnnnnnnnnnnnnnnnnnnnnnnnnnnnnnnnnnnnnnnnnnnnnnnnnnnnnnnnnnnnnnnnnnnnnnnnnnnnnnnnnnnnnnnnnnnnnnnnnnnnnnnnnnnnnnnnnnnnnnnnnnnnnnnnnnnnnnnnnnnnnnnnnnnnnnnnnnnnnnnnnnnnnnnnnnnnnnnnnnnnnnnnnnnnnnnnnnnnnnnnnnnnnnnnnnnnnnnnnnnnnnnnnnnnnnnnnnnnnnnnnnnnnnnnnnnnnnnnnnnnnnnnnnnnnnnnnnnnnnnnnnnnnnnnnnnnnnnnnnnnnnnnnnnnnnnnnnnnnnnnnnnnnnnnnnnnnnnnnnnnnnnnnnnnnnnnnnnnnnnnnnnnnnnnnnnnnnnnnnnnnnnnnnnnnnnnnnnnnnnnnnnnnnnnnnnnnnnnnnnnnnnnnnnnnnnnnnnnnnnnnnnnnnnnnnnnnnnnnnnnnnnnnnnnnnnnnnnnnnnnnnnnnnnnnnnnnnnnnnnnnnnnnnnnnnnnnnnnnnnnnnnnnnnnnnnnnnnnnnnnnnnnnnnnnnnnnnnnnnnnnnnnnnnnnnnnnnnnnnnnnnnnnnnnnnnnnnnnnnnnnnnnnnnnnnnnnnnnnnnnnnnnnnnnnnnnnnnnnnnnnnnnnnnnnnnnnnnnnnnnnnnnnnnnnnnnnnnnnnnnnnnnnnnnnnnnnnnnnnnnnnnnnnnnnnnnnnnnnnnnnnnnnnnnnnnnnnnnnnnnnnnnnnnnnnnnnnnnnnnnnnnnnnnnnnnnnnnnnnnnnnnnnnnnnnnnnnnnnnnnnnnnnnnnnnnnnnnnnnnnnnnnnnnnnnnnnnnnnnnnnnnnnnnnnnnnnnnnnnnnnnnnnnnnnnnnnnnnnnnnnnnnnnnnnnnnnnnnnnnnnnnnnnnnnnnnnnnnnnnnnnnnnnnnnnnnnnnnnnnnnnnnnnnnnnnnnnnnnnnnnnnnnnnnnnnnnnnnnnnnnnnnnnnnnnnnnnnnnnnnnnnnnnnnnnnnnnnnnnnnnnnnnnnnnnnnnnnnnnnnnnnnnnnnnnnnnnnnnnnnnnnnnnnnnnnnnnnnnnnnnnnnnnnnnnnnnnnnnnnnnnnnnnnnnnnnnnnnnnnnnnnnnnnnnnnnnnnnnnnnnnnnnnnnnnnnnnnnnnnnnnnnnnnnnnnnnnnnnnnnnnnnnnnnnnnnnnnnnnnnnnnnnnnnnnnnnnnnnnnnnnnnnnnnnnnnnnnnnnnnnnnnnnnnnnnnnnnnnnnnnnnnnnnnnnnnnnnnnnnnnnnnnnnnnnnnnnnnnnnnnnnnnnnnnnnnnnnnnnnnnnnnnnnnnnnnnnnnnnnnnnnnnnnnnnnnnnnnnnnnnnnnnnnnnnnnnnnnnnnnnnnnnnnnnnnnnnnnnnnnnnnnnnnnnnnnnnnnnnnnnnnnnnnnnnnnnnnnnnnnnnnnnnnnnnnnnnnnnnnnnnnnnnnnnnnnnnnnnnnnnnnnnnnnnnnnnnnnnnnnnnnnnnnnnnnnnnnnnnnnnnnnnnnnnnnnnnnnnnnnnnnnnnnnnnnnnnnnnnnnnnnnnnnnnnnnnnnnnnnnnnnnnnnnnnnnnnnnnnnnnnnnnnnnnnnnnnnnnnnnnnnnnnnnnnnnnnnnnnnnnnnnnnnnnnnnnnnnnnnnnnnnnnnnnnnnnnnnnnnnnnnnnnnnnnnnnnnnnnnnnnnnnnnnnnnnnnnnnnnnnnnnnnnnnnnnnnnnnnnnnnnnnnnnnnnnnnnnnnnnnnnnnnnnnnnnnnnnnnnnnnnnnnnnnnnnnnnnnnnnnnnnnnnnnnnnnnnnnnnnnnnnnnnnnnnnnnnnnnnnnnnnnnnnnnnnnnnnnnnnnnnnnnnnnnnnnnnnnnnnnnnnnnnnnnnnnnnnnnnnnnnnnnnnnnnnnnnnnnnnnnnnnnnnnnnnnnnnnnnnnnnnnnnnnnnnnnnnnnnnnnnnnnnnnnnnnnnnnnnnnnnnnnnnnnnnnnnnnnnnnnnnnnnnnnnnnnnnnnnnnnnnnnnnnnnnnnnnnnnnnnnnnnnnnnnnnnnnnnnnnnnnnnnnnnnnnnnnnnnnnnnnnnnnnnnnnnnnnnnnnnnnnnnnnnnnnnnnnnnnnnnnnnnnnnnnnnnnnnnnnnnnnnnnnnnnnnnnnnnnnnnnnnnnnnnnnnnnnnnnnnnnnnnnnnnnnnnnnnnnnnnnnnnnnnnnnnnnnnnnnnnnnnnnnnnnnnnnnnnnnnnnnnnnnnnnnnnnnnnnnnnnnnnnnnnnnnnnnnnnnnnnnnnnnnnnnnnnnnnnnnnnnnnnnnnnnnnnnnnnnnnnnnnnnnnnnnnnnnnnnnnnnnnnnnnnnnnnnnnnnnnnnnnnnnnnnnnnnnnnnnnnnnnnnnnnnnnnnnnnnnnnnnnnnnnnnnnnnnnnnnnnnnnnnnnnnnnnnnnnnnnnnnnnnnnnnnnnnnnnnnnnnnnnnnnnnnnnnnnnnnnnnnnnnnnnnnnnnnnnnnnnnnnnnnnnnnnnnnnnnnnnnnnnnnnnnnnnnnnnnnnnnnnnnnnnnnnnnnnnnnnnnnnnnnnnnnnnnnnnnnnnnnnnnnnnnnnnnnnnnnnnnnnnnnnnnnnnnnnnnnnnnnnnnnnnnnnnnnnnnnnnnnnnnnnnnnnnnnnnnnnnnnnnnnnnnnnnnnnnnnnnnnnnnnnnnnnnnnnnnnnnnnnnnnnnnnnnnnnnnnnnnnnnnnnnnnnnnnnnnnnnnnnnnnnnnnnnnnnnnnnnnnnnnnnnnnnnnnnnnnnnnnnnnnnnnnnnnnnnnnnnnnnnnnnnnnnnnnnnnnnnnnnnnnnnnnnnnnnnnnnnnnnnnnnnnnnnnnnnnnnnnnnnnnnnnnnnnnnnnnnnnnnnnnnnnnnnnnnnnnnnnnnnnnnnnnnnnnnnnnnnnnnnnnnnnnnnnnnnnnnnnnnnnnnnnnnnnnnnnnnnnnnnnnnnnnnnnnnnnnnnnnnnnnnnnnnnnnnnnnnnnnnnnnnnnnnnnnnnnnnnnnnnnnnnnnnnnnnnnnnnnnnnnnnnnnnnnnnnnnnnnnnnnnnnnnnnnnnnnnnnnnnnnnnnnnnnnnnnnnnnnnnnnnnnnnnnnnnnnnnnnnnnnnnnnnnnnnnnnnnnnnnnnnnnnnnnnnnnnnnnnnnnnnnnnnnnnnnnnnnnnnnnnnnnnnnnnnnnnnnnnnnnnnnnnnnnnnnnnnnnnnnnnnnnnnnnnnnnnnnnnnnnnnnnnnnnnnnnnnnnnnnnnnnnnnnnnnnnnnnnnnnnnnnnnnnnnnnnnnnnnnnnnnnnnnnnnnnnnnnnnnnnnnnnnnnnnnnnnnnnnnnnnnnnnnnnnnnnnnnnnnnnnnnnnnnnnnnnnnnnnnnnnnnnnnnnnnnnnnnnnnnnnnnnnnnnnnnnnnnnnnnnnnnnnnnnnnnnnnnnnnnnnnnnnnnnnnnnnnnnnnnnnnnnnnnnnnnnnnnnnnnnnnnnnnnnnnnnnnnnnnnnnnnnnnnnnnnnnnnnnnnnnnnnnnnnnnnnnnnnnnnnnnnnnnnnnnnnnnnnnnnnnnnnnnnnnnnnnnnnnnnnnnnnnnnnnnnnnnnnnnnnnnnnnnnnnnnnnnnnnnnnnnnnnnnnnnnnnnnnnnnnnnnnnnnnnnnnnnnnnnnnnnnnnnnnnnnnnnnnnnnnnnnnnnnnnnnnnnnnnnnnnnnnnnnnnnnnnnnnnnnnnnnnnnnnnnnnnnnnnnnnnnnnnnnnnnnnnnnnnnnnnnnnnnnnnnnnnnnnnnnnnnnnnnnnnnnnnnnnnnnnnnnnnnnnnnnnnnnnnnnnnnnnnnnnnnnnnnnnnnnnnnnnnnnnnnnnnnnnnnnnnnnnnnnnnnnnnnnnnnnnnnnnnnnnnnnnnnnnnnnnnnnnnnnnnnnnnnnnnnnnnnnnnnnnnnnnnnnnnnnnnnnnnnnnnnnnnnnnnnnnnnnnnnnnnnnnnnnnnnnnnnnnnnnnnnnnnnnnnnnnnnnnnnnnnnnnnnnnnnnnnnnnnnnnnnnnnnnnnnnnnnnnnnnnnnnnnnnnnnnnnnnnnnnnnnnnnnnnnnnnnnnnnnnnnnnnnnnnnnnnnnnnnnnnnnnnnnnnnnnnnnnnnnnnnnnnnnnnnnnnnnnnnnnnnnnnnnnnnnnnnnnnnnnnnnnnnnnnnnnnnnnnnnnnnnnnnnnnnnnnnnnnnnnnnnnnnnnnnnnnnnnnnnnnnnnnnnnnnnnnnnnnnnnnnnnnnnnnnnnnnnnnnnnnnnnnnnnnnnnnnnnnnnataacctaaaataaaggacttacttcccaatcgggcaagtaatccatatgtttggagcccgaaggtcccagaacgattggccgacggggacatcgaccttcctgacgctggcgtcgagcgaggcacgagcatggacgccagcaacatctcctgtagtccatactcgcaagctcgctgcactccaggctcaccaacgttggaaggcaaattcacaaattcacaaccggtaaatatggcttgtgaatttgcaacctgctgatagacgggtaattatgaggctaattcacaaaaaaggggtctcttatacatccgcggaagccgattgtaaacaggatatgatgtatccacgctaccagtctataatacatatagaaatagtatatataatatataatagtattatatattattatatattgatattatatcatctctaccttcccttcatctcttgtttgcggcatgagccactgcaaaccggcattctcccctggtccggctggatataagagataagcgtattttgtgaatttgtcccccaactcactgtgccacaataacacacggattcacaagccatatttaccggttgtgaatttgtgaatctgaccttgccggccttaaggaagtttgaaattagagccctattttggacttgacaaattattccttggtaaatttggtgtataatagctatggggcataatgatgttagcctgtggaacggcctctgtaaaggatcaacaagctatcaaccctccccatgcgacaggagcttcaatgtattataatttgacagacaaaccctggatcagtgtgctacagcttgacgggcattctgccaggctcggcctggctgaggtcctgcgaaaagcacacacactgcgtttggcttacggcaatccgatggaccgcatgtccgttttccgtttcctcctcgccctgggctattggtgttttgccaatacaaaacaagcgccggtatcagataagccactgcctcaggcatggacggactggcttgaacaaaaccaagaatatttcgaattgttcggtgatggccccagattctaccaatccccaggaacatccagaatacgccccagcacggaccttatccacgagcttcccacggcaaacaatttctggcacttccgccatgtgaccgatttcatcgatggcatttgcccagcttgctgcgttaccggtctgctgcgcctgccactctttaccaccgtaggcggcagcggaatcggagccggcatcaacagaactcctcccttctatgccatctggcagggtgatagtctgtcggaatcgatattcctgaattgggaacccacttcccggttgggtgttcctgcctggctgaacccgtttggatcccaaaacgagaaggatgtagccttgctgactggcctcacctggctgccccgcaaggtattcctgcttggcccggtgtcagacggagcaaaatgcagcgcctgcggagaagagcatgagcctctggtctatgcctgcaacaatgaggcggtgaaagtgcctccgaaccttgtctggaacgaccctcacgcgatttaccgggatgacaataatggcctgactgcccaggtggctctgatgtccggggacaaatacactttcgctaacagggattggcataaacccctggtcggcttcttacgggcgaaaggcatgtctcggaccgccacgctgtttttagtgggcttcacaagcgttcaagccaaatgtgtggacgtttgggaaaagaccattgccctatccggaaaaacaagctccgaggaactgctggaccagatatccgaaagagcctactccctgcacaggatgaggaaacaagaccgccggggcgattacaaggaatccgtgggaatcaccgccgtggcggacatcatcccgcacgtagagcatcgggttgacgtccattcgggcgagatggtggaaaacagcggcaatgtctggcaggaagcggatgaagattacggattcttcatgaagcgttttgccgtttctctagtgccggaaattacggttgccgccaagcttgaacgagaacaactggctcggcgcaagccctggcccctaaaaccaaaatcaattaaaaaaccttcatccggaggcgataatgaatgagagcaccgtgaaatttgttcggagcctgggcgaactcaaagagggcgacctgggcttgctcagaaagctcaggggtcgccgtctggatgaatccctgccgggtttcgacctgttttccggcctgtggtggccactccgcagtataagccccaaaacccccaggcggaaggtggtctggctagtcaccaagcttttcgcggaattccgctttgagcaaaagaaaggcgccagcctgccttggctcatgggcagaatatgccgtggacttaaagaagaaaaagagttcccacgtgttttagccaggttcgaccgcttgctcacgctcgagttgaaccaactggaggaaccgctggcgcaagtgctcgcgattttaaaaagacatgacattgccagtctggactgggttgccctcatcgatgacctctccgcttgggaacgggaatcaaacagagcgatatggtcagacacatttatttcagcatttaataatcagcaaggaggaatcaaatgttgattgaaatacacatgatccaaaaccacagcccggccaacctgaaccgggacgacctgggcgcgcccaagacctgttatttcggtggggtgttgcggtcccgcatctccagccagtgcctaaagcggagcatcaggatgagcgatgaattcaaaaacttgctcgggggtatccgtacccgtcggttggccgagttgattacaaaagctacaggacaggactgcaggaatcaggcagaggaagttctgaacaaagccggtttgaaacacgaaaacggacatagtaagatgctggtgttcatgacccggaacaagatcgatgcccttgctcaaattgtcaccagcgaaggcctgagtgttgcagagaaagccaagaaagcggcagatgtaatatcgggggcaatacattcccctgacatcgctctgtgcggaagaatgctcgagcccgataccaaggacaagaacacagacaaggtcaagtgggaaaataccactgttgaagcagccctgcaggtgtcgcacgccatttcaacccacatcgcccgcccagaaatagattactatgtagcagctgatgacgagcctggcgacgacacaggtgctggattcatagacgaggcgatgtttgcttcggcctgtttctacaaatattactcaattgattggaataccttgataatcaacctccagggtaatgaaaagttggcagctcatactgtcggagcctttatccaggccgctgcactcactaatcccagcggaaagcagaacagctttgccgcacataaccttcccgatggaatattggtagaaataaaagagacacctgtcagctatgcaaatgcctttgtgcgaccggtgggaatcgttaaggattctgacttggtagaacaaagcattggccaactggccaactatgtgaaggatataagtgccggtttcttccctggacagatgaaaggcaacgctctgtggttctcgcccaatggacgttatcccctaaagcctcaacagggcacgctggacataaagccagtttgcaacctgctagaacttgttcgcgaagcagttgagatgttgggttttgaatgggatgatgtaaaaaacgagaaagtagagagttgaaatgtcttctccgcctaataccctgttcctgagattggaggctccccttcaggcctggggaagcaatgaggccaaattcgccgtgcgcaggacagccgacgcgcccaccaaatccggagtggcaggcctgctctgcgctgccctgggaatcagccgggccgaagccggacagtattggctgggtgaaattgccaaattgcgcatgggggtgcggatagaccgcccgggcatccgctggtgggattaccatactgtgggagcggagcagaagctgcgcatttctgacctgaaaatgcccaacggcctagttctggttggcactgccctggccaaaaacctgggcgcggacaagatcaaatccaaacccggggctttgctctcccgacgcgagtatttggctgatgccagcttcctggttgcgctccagggtgaaccggatatcgtggcacaactggctgaagcgctgaaaaaaccagtctggacgctttatctggggcgaaaatcctgtcccccctcccgtccggtggatgaacacccgccagggttttatgccagtctgaaagaggctttgcggtcgatcccggcgcaactgagggaaaaaggcgaaccgatacctgacagtgttccctgtgtgctcgactgggttccggcccatgatgacgtgcacgctccgccgaacgccgaagcgcattacgacgtgccggtgtcctttgagcctccccaccacttgccccggctggtgatccgctgtaacctgccattggaccgcaacttcgaggcagagaccgtgctttccggcaaagcctggcaaccgccccgcaaccgggcaaattacgacaatcctgaatacaaaagggtccgcgctgagcgtttggtgatggacaatgccgcctgcatgttctgcaaggcacccgccactactgtgcagcacgtgaattaccgacgcgccggaggcagcgagaagccggaggacttgcgcgccctctgccgcctctgccacgatgcctgcaccatgctggaatatggcagcggcatgaccatggaccgcatagatccctgtgaccccgcctggcgtgagcgcatcttggccaaacgcgaggaaataatcaaattccgctcgctggagcagcgcaggcgcaaactcgatccgaaggaggagaacggatgatgtatctatcccaactgctcatcgacacaggcggcaaccctgaccggccaaggcccgggcgcttgtggctgaacaatatctataatgtccaccggcggctcagcatggctttccccatgcgcaagcgcaaggaaggagacccgaggtttctgcagccctttgaccccgcagattttgaaaagcgccagttcctctttcgggtggacaacaacaccgatggagaaaatcaaagggcgatggttttggtgcagtcgtccctgccgccggattgggactgggctttccagaatgccacgggatttttggcagcccctccccaggttaaggaatacgatccccagttctcagcaggtcagcggctgcgcttccgcatcctcgtgaatgccagtgtcaaacgcaaaatcgacgagttgcgggaaggacccggaggaaaggaaaaaacgggaagggttctgcacaaacgggtcgcccttacctgggacacaaattccaacccaaaggatgcggtggcgcaatggtttgccgccaaggctggcagactgggcttcacgcccggggagaccgaactggtaagcctgggctgggtatacggttccaaaccggagccccggggaaattcgccccggcgtgagaacgaataccgtcccctgagataccgttccgccctgctggaaggttatctgacagtggatgatgcctttctgttccgggaagccttggaaaaaggtatcggcagcgccaaaggaatgggcttcggcctcctttccgtggttccggcaagtgatgcgtaacagagaccttcacctaatgccaaaaatgcgggaccgcttcacctatctctatgtggagcatgccaaaatagacaaagaacaacaggcaatcgcctttcacgatgccatgggctccactcctgttccctgcgctggactggccctgctgatgctggggccaggcgtatccatcacccatgcggccatccttgttttagcagaatgcggctgtttggtggcttgggtgggggaacagggagtccgcttttactcatccgggacagggaccacccgtagttccgccaaccttatgcgtcaggctgccgcctggtcaaatcgagatacgcatctgcggatagttcgcagaatgtatgaattgaggttcaaggaaaaactggacccaaccctctctcttgaacagataaggggaaaagagggagcgagagtacgggatacctatttcagactttcaaaagaattcgatgtgcccatgagtgcgaggaattacgacaggagcaactggaataaaaccgaccccatcaacagagccctgtccgttgccaattcctgtctctatggcatctgccacgccgcgatagtggccgctggctattcacctgccctgggtttcgttcatactggcaaacaactgtcatttgtttatgacattgccgatctttataaaatggaaacctccgtgcccgcggctttcatagccacagccgcaggggtcgataacctggacagaaggacacgcattgcctgccgtgaccagttctatcaatttggtctgctaaagaagatagtggccgacattcacgcccttttcggtattctggaaacttcggacgatgagccagaccttgctgatgtcgatccagccgtgccaggcgggctttggaacccagatgataaagtgagccccggcggcttgtcatggggtctggatgatcctggaggccatgatgatggttctggtgcttgaaaaagttccctctggcctgagaggagaaattacacgctggctcctcgaaatcaaggctggagtatttgtcggtcaggtatcggccatgataagggaaaagctgtgggacaaggccaggtctggttgtgccggtggaacttgtatcatgatttacagcaagcattgcgaacaaggctttggaattgagttttggggtgccgcggaaaggatagtgacagaatgggaaggattgaaattgatgaccaagcatccgtgatccatacttgaagcctgttcaatggcctcaaagcgtctactttcgaagtgtgttccccacctgcgtgggggtgaaccgatatggcgagattagacccaagcacagtaaaagtgttccccacctgcgtgggggtgaaccgacacagaccaccgaggacgctttggaggcgatgtgttccccacctgcgtgggggtgaaccggtgc

SEQ ID NO: 1114 - DNA, 103748 bp, Artificial Sequence
  Synthetic Oligonucleotide
  misc_feature (1)..(96610): n is a, c, g, or t
nnnnnnnnnnnnnnnnnnnnnnnnnnnnnnnnnnnnnnnnnnnnnnnnnnnnnnnnnnnnnnnnnnnnnnnnnnnnnnnnnnnnnnnnnnnnnnnnnnnnnnnnnnnnnnnnnnnnnnnnnnnnnnnnnnnnnnnnnnnnnnnnnnnnnnnnnnnnnnnnnnnnnnnnnnnnnnnnnnnnnnnnnnnnnnnnnnnnnnnnnnnnnnnnnnnnnnnnnnnnnnnnnnnnnnnnnnnnnnnnnnnnnnnnnnnnnnnnnnnnnnnnnnnnnnnnnnnnnnnnnnnnnnnnnnnnnnnnnnnnnnnnnnnnnnnnnnnnnnnnnnnnnnnnnnnnnnnnnnnnnnnnnnnnnnnnnnnnnnnnnnnnnnnnnnnnnnnnnnnnnnnnnnnnnnnnnnnnnnnnnnnnnnnnnnnnnnnnnnnnnnnnnnnnnnnnnnnnnnnnnnnnnnnnnnnnnnnnnnnnnnnnnnnnnnnnnnnnnnnnnnnnnnnnnnnnnnnnnnnnnnnnnnnnnnnnnnnnnnnnnnnnnnnnnnnnnnnnnnnnnnnnnnnnnnnnnnnnnnnnnnnnnnnnnnnnnnnnnnnnnnnnnnnnnnnnnnnnnnnnnnnnnnnnnnnnnnnnnnnnnnnnnnnnnnnnnnnnnnnnnnnnnnnnnnnnnnnnnnnnnnnnnnnnnnnnnnnnnnnnnnnnnnnnnnnnnnnnnnnnnnnnnnnnnnnnnnnnnnnnnnnnnnnnnnnnnnnnnnnnnnnnnnnnnnnnnnnnnnnnnnnnnnnnnnnnnnnnnnnnnnnnnnnnnnnnnnnnnnnnnnnnnnnnnnnnnnnnnnnnnnnnnnnnnnnnnnnnnnnnnnnnnnnnnnnnnnnnnnnnnnnnnnnnnnnnnnnnnnnnnnnnnnnnnnnnnnnnnnnnnnnnnnnnnnnnnnnnnnnnnnnnnnnnnnnnnnnnnnnnnnnnnnnnnnnnnnnnnnnnnnnnnnnnnnnnnnnnnnnnnnnnnnnnnnnnnnnnnnnnnnnnnnnnnnnnnnnnnnnnnnnnnnnnnnnnnnnnnnnnnnnnnnnnnnnnnnnnnnnnnnnnnnnnnnnnnnnnnnnnnnnnnnnnnnnnnnnnnnnnnnnnnnnnnnnnnnnnnnnnnnnnnnnnnnnnnnnnnnnnnnnnnnnnnnnnnnnnnnnnnnnnnnnnnnnnnnnnnnnnnnnnnnnnnnnnnnnnnnnnnnnnnnnnnnnnnnnnnnnnnnnnnnnnnnnnnnnnnnnnnnnnnnnnnnnnnnnnnnnnnnnnnnnnnnnnnnnnnnnnnnnnnnnnnnnnnnnnnnnnnnnnnnnnnnnnnnnnnnnnnnnnnnnnnnnnnnnnnnnnnnnnnnnnnnnnnnnnnnnnnnnnnnnnnnnnnnnnnnnnnnnnnnnnnnnnnnnnnnnnnnnnnnnnnnnnnnnnnnnnnnnnnnnnnnnnnnnnnnnnnnnnnnnnnnnnnnnnnnnnnnnnnnnnnnnnnnnnnnnnnnnnnnnnnnnnnnnnnnnnnnnnnnnnnnnnnnnnnnnnnnnnnnnnnnnnnnnnnnnnnnnnnnnnnnnnnnnnnnnnnnnnnnnnnnnnnnnnnnnnnnnnnnnnnnnnnnnnnnnnnnnnnnnnnnnnnnnnnnnnnnnnnnnnnnnnnnnnnnnnnnnnnnnnnnnnnnnnnnnnnnnnnnnnnnnnnnnnnnnnnnnnnnnnnnnnnnnnnnnnnnnnnnnnnnnnnnnnnnnnnnnnnnnnnnnnnnnnnnnnnnnnnnnnnnnnnnnnnnnnnnnnnnnnnnnnnnnnnnnnnnnnnnnnnnnnnnnnnnnnnnnnnnnnnnnnnnnnnnnnnnnnnnnnnnnnnnnnnnnnnnnnnnnnnnnnnnnnnnnnnnnnnnnnnnnnnnnnnnnnnnnnnnnnnnnnnnnnnnnnnnnnnnnnnnnnnnnnnnnnnnnnnnnnnnnnnnnnnnnnnnnnnnnnnnnnnnnnnnnnnnnnnnnnnnnnnnnnnnnnnnnnnnnnnnnnnnnnnnnnnnnnnnnnnnnnnnnnnnnnnnnnnnnnnnnnnnnnnnnnnnnnnnnnnnnnnnnnnnnnnnnnnnnnnnnnnnnnnnnnnnnnnnnnnnnnnnnnnnnnnnnnnnnnnnnnnnnnnnnnnnnnnnnnnnnnnnnnnnnnnnnnnnnnnnnnnnnnnnnnnnnnnnnnnnnnnnnnnnnnnnnnnnnnnnnnnnnnnnnnnnnnnnnnnnnnnnnnnnnnnnnnnnnnnnnnnnnnnnnnnnnnnnnnnnnnnnnnnnnnnnnnnnnnnnnnnnnnnnnnnnnnnnnnnnnnnnnnnnnnnnnnnnnnnnnnnnnnnnnnnnnnnnnnnnnnnnnnnnnnnnnnnnnnnnnnnnnnnnnnnnnnnnnnnnnnnnnnnnnnnnnnnnnnnnnnnnnnnnnnnnnnnnnnnnnnnnnnnnnnnnnnnnnnnnnnnnnnnnnnnnnnnnnnnnnnnnnnnnnnnnnnnnnnnnnnnnnnnnnnnnnnnnnnnnnnnnnnnnnnnnnnnnnnnnnnnnnnnnnnnnnnnnnnnnnnnnnnnnnnnnnnnnnnnnnnnnnnnnnnnnnnnnnnnnnnnnnnnnnnnnnnnnnnnnnnnnnnnnnnnnnnnnnnnnnnnnnnnnnnnnnnnnnnnnnnnnnnnnnnnnnnnnnnnnnnnnnnnnnnnnnnnnnnnnnnnnnnnnnnnnnnnnnnnnnnnnnnnnnnnnnnnnnnnnnnnnnnnnnnnnnnnnnnnnnnnnnnnnnnnnnnnnnnnnnnnnnnnnnnnnnnnnnnnnnnnnnnnnnnnnnnnnnnnnnnnnnnnnnnnnnnnnnnnnnnnnnnnnnnnnnnnnnnnnnnnnnnnnnnnnnnnnnnnnnnnnnnnnnnnnnnnnnnnnnnnnnnnnnnnnnnnnnnnnnnnnnnnnnnnnnnnnnnnnnnnnnnnnnnnnnnnnnnnnnnnnnnnnnnnnnnnnnnnnnnnnnnnnnnnnnnnnnnnnnnnnnnnnnnnnnnnnnnnnnnnnnnnnnnnnnnnnnnnnnnnnnnnnnnnnnnnnnnnnnnnnnnnnnnnnnnnnnnnnnnnnnnnnnnnnnnnnnnnnnnnnnnnnnnnnnnnnnnnnnnnnnnnnnnnnnnnnnnnnnnnnnnnnnnnnnnnnnnnnnnnnnnnnnnnnnnnnnnnnnnnnnnnnnnnnnnnnnnnnnnnnnnnnnnnnnnnnnnnnnnnnnnnnnnnnnnnnnnnnnnnnnnnnnnnnnnnnnnnnnnnnnnnnnnnnnnnnnnnnnnnnnnnnnnnnnnnnnnnnnnnnnnnnnnnnnnnnnnnnnnnnnnnnnnnnnnnnnnnnnnnnnnnnnnnnnnnnnnnnnnnnnnnnnnnnnnnnnnnnnnnnnnnnnnnnnnnnnnnnnnnnnnnnnnnnnnnnnnnnnnnnnnnnnnnnnnnnnnnnnnnnnnnnnnnnnnnnnnnnnnnnnnnnnnnnnnnnnnnnnnnnnnnnnnnnnnnnnnnnnnnnnnnnnnnnnnnnnnnnnnnnnnnnnnnnnnnnnnnnnnnnnnnnnnnnnnnnnnnnnnnnnnnnnnnnnnnnnnnnnnnnnnnnnnnnnnnnnnnnnnnnnnnnnnnnnnnnnnnnnnnnnnnnnnnnnnnnnnnnnnnnnnnnnnnnnnnnnnnnnnnnnnnnnnnnnnnnnnnnnnnnnnnnnnnnnnnnnnnnnnnnnnnnnnnnnnnnnnnnnnnnnnnnnnnnnnnnnnnnnnnnnnnnnnnnnnnnnnnnnnnnnnnnnnnnnnnnnnnnnnnnnnnnnnnnnnnnnnnnnnnnnnnnnnnnnnnnnnnnnnnnnnnnnnnnnnnnnnnnnnnnnnnnnnnnnnnnnnnnnnnnnnnnnnnnnnnnnnnnnnnnnnnnnnnnnnnnnnnnnnnnnnnnnnnnnnnnnnnnnnnnnnnnnnnnnnnnnnnnnnnnnnnnnnnnnnnnnnnnnnnnnnnnnnnnnnnnnnnnnnnnnnnnnnnnnnnnnnnnnnnnnnnnnnnnnnnnnnnnnnnnnnnnnnnnnnnnnnnnnnnnnnnnnnnnnnnnnnnnnnnnnnnnnnnnnnnnnnnnnnnnnnnnnnnnnnnnnnnnnnnnnnnnnnnnnnnnnnnnnnnnnnnnnnnnnnnnnnnnnnnnnnnnnnnnnnnnnnnnnnnnnnnnnnnnnnnnnnnnnnnnnnnnnnnnnnnnnnnnnnnnnnnnnnnnnnnnnnnnnnnnnnnnnnnnnnnnnnnnnnnnnnnnnnnnnnnnnnnnnnnnnnnnnnnnnnnnnnnnnnnnnnnnnnnnnnnnnnnnnnnnnnnnnnnnnnnnnnnnnnnnnnnnnnnnnnnnnnnnnnnnnnnnnnnnnnnnnnnnnnnnnnnnnnnnnnnnnnnnnnnnnnnnnnnnnnnnnnnnnnnnnnnnnnnnnnnnnnnnnnnnnnnnnnnnnnnnnnnnnnnnnnnnnnnnnnnnnnnnnnnnnnnnnnnnnnnnnnnnnnnnnnnnnnnnnnnnnnnnnnnnnnnnnnnnnnnnnnnnnnnnnnnnnnnnnnnnnnnnnnnnnnnnnnnnnnnnnnnnnnnnnnnnnnnnnnnnnnnnnnnnnnnnnnnnnnnnnnnnnnnnnnnnnnnnnnnnnnnnnnnnnnnnnnnnnnnnnnnnnnnnnnnnnnnnnnnnnnnnnnnnnnnnnnnnnnnnnnnnnnnnnnnnnnnnnnnnnnnnnnnnnnnnnnnnnnnnnnnnnnnnnnnnnnnnnnnnnnnnnnnnnnnnnnnnnnnnnnnnnnnnnnnnnnnnnnnnnnnnnnnnnnnnnnnnnnnnnnnnnnnnnnnnnnnnnnnnnnnnnnnnnnnnnnnnnnnnnnnnnnnnnnnnnnnnnnnnnnnnnnnnnnnnnnnnnnnnnnnnnnnnnnnnnnnnnnnnnnnnnnnnnnnnnnnnnnnnnnnnnnnnnnnnnnnnnnnnnnnnnnnnnnnnnnnnnnnnnnnnnnnnnnnnnnnnnnnnnnnnnnnnnnnnnnnnnnnnnnnnnnnnnnnnnnnnnnnnnnnnnnnnnnnnnnnnnnnnnnnnnnnnnnnnnnnnnnnnnnnnnnnnnnnnnnnnnnnnnnnnnnnnnnnnnnnnnnnnnnnnnnnnnnnnnnnnnnnnnnnnnnnnnnnnnnnnnnnnnnnnnnnnnnnnnnnnnnnnnnnnnnnnnnnnnnnnnnnnnnnnnnnnnnnnnnnnnnnnnnnnnnnnnnnnnnnnnnnnnnnnnnnnnnnnnnnnnnnnnnnnnnnnnnnnnnnnnnnnnnnnnnnnnnnnnnnnnnnnnnnnnnnnnnnnnnnnnnnnnnnnnnnnnnnnnnnnnnnnnnnnnnnnnnnnnnnnnnnnnnnnnnnnnnnnnnnnnnnnnnnnnnnnnnnnnnnnnnnnnnnnnnnnnnnnnnnnnnnnnnnnnnnnnnnnnnnnnnnnnnnnnnnnnnnnnnnnnnnnnnnnnnnnnnnnnnnnnnnnnnnnnnnnnnnnnnnnnnnnnnnnnnnnnnnnnnnnnnnnnnnnnnnnnnnnnnnnnnnnnnnnnnnnnnnnnnnnnnnnnnnnnnnnnnnnnnnnnnnnnnnnnnnnnnnnnnnnnnnnnnnnnnnnnnnnnnnnnnnnnnnnnnnnnnnnnnnnnnnnnnnnnnnnnnnnnnnnnnnnnnnnnnnnnnnnnnnnnnnnnnnnnnnnnnnnnnnnnnnnnnnnnnnnnnnnnnnnnnnnnnnnnnnnnnnnnnnnnnnnnnnnnnnnnnnnnnnnnnnnnnnnnnnnnnnnnnnnnnnnnnnnnnnnnnnnnnnnnnnnnnnnnnnnnnnnnnnnnnnnnnnnnnnnnnnnnnnnnnnnnnnnnnnnnnnnnnnnnnnnnnnnnnnnnnnnnnnnnnnnnnnnnnnnnnnnnnnnnnnnnnnnnnnnnnnnnnnnnnnnnnnnnnnnnnnnnnnnnnnnnnnnnnnnnnnnnnnnnnnnnnnnnnnnnnnnnnnnnnnnnnnnnnnnnnnnnnnnnnnnnnnnnnnnnnnnnnnnnnnnnnnnnnnnnnnnnnnnnnnnnnnnnnnnnnnnnnnnnnnnnnnnnnnnnnnnnnnnnnnnnnnnnnnnnnnnnnnnnnnnnnnnnnnnnnnnnnnnnnnnnnnnnnnnnnnnnnnnnnnnnnnnnnnnnnnnnnnnnnnnnnnnnnnnnnnnnnnnnnnnnnnnnnnnnnnnnnnnnnnnnnnnnnnnnnnnnnnnnnnnnnnnnnnnnnnnnnnnnnnnnnnnnnnnnnnnnnnnnnnnnnnnnnnnnnnnnnnnnnnnnnnnnnnnnnnnnnnnnnnnnnnnnnnnnnnnnnnnnnnnnnnnnnnnnnnnnnnnnnnnnnnnnnnnnnnnnnnnnnnnnnnnnnnnnnnnnnnnnnnnnnnnnnnnnnnnnnnnnnnnnnnnnnnnnnnnnnnnnnnnnnnnnnnnnnnnnnnnnnnnnnnnnnnnnnnnnnnnnnnnnnnnnnnnnnnnnnnnnnnnnnnnnnnnnnnnnnnnnnnnnnnnnnnnnnnnnnnnnnnnnnnnnnnnnnnnnnnnnnnnnnnnnnnnnnnnnnnnnnnnnnnnnnnnnnnnnnnnnnnnnnnnnnnnnnnnnnnnnnnnnnnnnnnnnnnnnnnnnnnnnnnnnnnnnnnnnnnnnnnnnnnnnnnnnnnnnnnnnnnnnnnnnnnnnnnnnnnnnnnnnnnnnnnnnnnnnnnnnnnnnnnnnnnnnnnnnnnnnnnnnnnnnnnnnnnnnnnnnnnnnnnnnnnnnnnnnnnnnnnnnnnnnnnnnnnnnnnnnnnnnnnnnnnnnnnnnnnnnnnnnnnnnnnnnnnnnnnnnnnnnnnnnnnnnnnnnnnnnnnnnnnnnnnnnnnnnnnnnnnnnnnnnnnnnnnnnnnnnnnnnnnnnnnnnnnnnnnnnnnnnnnnnnnnnnnnnnnnnnnnnnnnnnnnnnnnnnnnnnnnnnnnnnnnnnnnnnnnnnnnnnnnnnnnnnnnnnnnnnnnnnnnnnnnnnnnnnnnnnnnnnnnnnnnnnnnnnnnnnnnnnnnnnnnnnnnnnnnnnnnnnnnnnnnnnnnnnnnnnnnnnnnnnnnnnnnnnnnnnnnnnnnnnnnnnnnnnnnnnnnnnnnnnnnnnnnnnnnnnnnnnnnnnnnnnnnnnnnnnnnnnnnnnnnnnnnnnnnnnnnnnnnnnnnnnnnnnnnnnnnnnnnnnnnnnnnnnnnnnnnnnnnnnnnnnnnnnnnnnnnnnnnnnnnnnnnnnnnnnnnnnnnnnnnnnnnnnnnnnnnnnnnnnnnnnnnnnnnnnnnnnnnnnnnnnnnnnnnnnnnnnnnnnnnnnnnnnnnnnnnnnnnnnnnnnnnnnnnnnnnnnnnnnnnnnnnnnnnnnnnnnnnnnnnnnnnnnnnnnnnnnnnnnnnnnnnnnnnnnnnnnnnnnnnnnnnnnnnnnnnnnnnnnnnnnnnnnnnnnnnnnnnnnnnnnnnnnnnnnnnnnnnnnnnnnnnnnnnnnnnnnnnnnnnnnnnnnnnnnnnnnnnnnnnnnnnnnnnnnnnnnnnnnnnnnnnnnnnnnnnnnnnnnnnnnnnnnnnnnnnnnnnnnnnnnnnnnnnnnnnnnnnnnnnnnnnnnnnnnnnnnnnnnnnnnnnnnnnnnnnnnnnnnnnnnnnnnnnnnnnnnnnnnnnnnnnnnnnnnnnnnnnnnnnnnnnnnnnnnnnnnnnnnnnnnnnnnnnnnnnnnnnnnnnnnnnnnnnnnnnnnnnnnnnnnnnnnnnnnnnnnnnnnnnnnnnnnnnnnnnnnnnnnnnnnnnnnnnnnnnnnnnnnnnnnnnnnnnnnnnnnnnnnnnnnnnnnnnnnnnnnnnnnnnnnnnnnnnnnnnnnnnnnnnnnnnnnnnnnnnnnnnnnnnnnnnnnnnnnnnnnnnnnnnnnnnnnnnnnnnnnnnnnnnnnnnnnnnnnnnnnnnnnnnnnnnnnnnnnnnnnnnnnnnnnnnnnnnnnnnnnnnnnnnnnnnnnnnnnnnnnnnnnnnnnnnnnnnnnnnnnnnnnnnnnnnnnnnnnnnnnnnnnnnnnnnnnnnnnnnnnnnnnnnnnnnnnnnnnnnnnnnnnnnnnnnnnnnnnnnnnnnnnnnnnnnnnnnnnnnnnnnnnnnnnnnnnnnnnnnnnnnnnnnnnnnnnnnnnnnnnnnnnnnnnnnnnnnnnnnnnnnnnnnnnnnnnnnnnnnnnnnnnnnnnnnnnnnnnnnnnnnnnnnnnnnnnnnnnnnnnnnnnnnnnnnnnnnnnnnnnnnnnnnnnnnnnnnnnnnnnnnnnnnnnnnnnnnnnnnnnnnnnnnnnnnnnnnnnnnnnnnnnnnnnnnnnnnnnnnnnnnnnnnnnnnnnnnnnnnnnnnnnnnnnnnnnnnnnnnnnnnnnnnnnnnnnnnnnnnnnnnnnnnnnnnnnnnnnnnnnnnnnnnnnnnnnnnnnnnnnnnnnnnnnnnnnnnnnnnnnnnnnnnnnnnnnnnnnnnnnnnnnnnnnnnnnnnnnnnnnnnnnnnnnnnnnnnnnnnnnnnnnnnnnnnnnnnnnnnnnnnnnnnnnnnnnnnnnnnnnnnnnnnnnnnnnnnnnnnnnnnnnnnnnnnnnnnnnnnnnnnnnnnnnnnnnnnnnnnnnnnnnnnnnnnnnnnnnnnnnnnnnnnnnnnnnnnnnnnnnnnnnnnnnnnnnnnnnnnnnnnnnnnnnnnnnnnnnnnnnnnnnnnnnnnnnnnnnnnnnnnnnnnnnnnnnnnnnnnnnnnnnnnnnnnnnnnnnnnnnnnnnnnnnnnnnnnnnnnnnnnnnnnnnnnnnnnnnnnnnnnnnnnnnnnnnnnnnnnnnnnnnnnnnnnnnnnnnnnnnnnnnnnnnnnnnnnnnnnnnnnnnnnnnnnnnnnnnnnnnnnnnnnnnnnnnnnnnnnnnnnnnnnnnnnnnnnnnnnnnnnnnnnnnnnnnnnnnnnnnnnnnnnnnnnnnnnnnnnnnnnnnnnnnnnnnnnnnnnnnnnnnnnnnnnnnnnnnnnnnnnnnnnnnnnnnnnnnnnnnnnnnnnnnnnnnnnnnnnnnnnnnnnnnnnnnnnnnnnnnnnnnnnnnnnnnnnnnnnnnnnnnnnnnnnnnnnnnnnnnnnnnnnnnnnnnnnnnnnnnnnnnnnnnnnnnnnnnnnnnnnnnnnnnnnnnnnnnnnnnnnnnnnnnnnnnnnnnnnnnnnnnnnnnnnnnnnnnnnnnnnnnnnnnnnnnnnnnnnnnnnnnnnnnnnnnnnnnnnnnnnnnnnnnnnnnnnnnnnnnnnnnnnnnnnnnnnnnnnnnnnnnnnnnnnnnnnnnnnnnnnnnnnnnnnnnnnnnnnnnnnnnnnnnnnnnnnnnnnnnnnnnnnnnnnnnnnnnnnnnnnnnnnnnnnnnnnnnnnnnnnnnnnnnnnnnnnnnnnnnnnnnnnnnnnnnnnnnnnnnnnnnnnnnnnnnnnnnnnnnnnnnnnnnnnnnnnnnnnnnnnnnnnnnnnnnnnnnnnnnnnnnnnnnnnnnnnnnnnnnnnnnnnnnnnnnnnnnnnnnnnnnnnnnnnnnnnnnnnnnnnnnnnnnnnnnnnnnnnnnnnnnnnnnnnnnnnnnnnnnnnnnnnnnnnnnnnnnnnnnnnnnnnnnnnnnnnnnnnnnnnnnnnnnnnnnnnnnnnnnnnnnnnnnnnnnnnnnnnnnnnnnnnnnnnnnnnnnnnnnnnnnnnnnnnnnnnnnnnnnnnnnnnnnnnnnnnnnnnnnnnnnnnnnnnnnnnnnnnnnnnnnnnnnnnnnnnnnnnnnnnnnnnnnnnnnnnnnnnnnnnnnnnnnnnnnnnnnnnnnnnnnnnnnnnnnnnnnnnnnnnnnnnnnnnnnnnnnnnnnnnnnnnnnnnnnnnnnnnnnnnnnnnnnnnnnnnnnnnnnnnnnnnnnnnnnnnnnnnnnnnnnnnnnnnnnnnnnnnnnnnnnnnnnnnnnnnnnnnnnnnnnnnnnnnnnnnnnnnnnnnnnnnnnnnnnnnnnnnnnnnnnnnnnnnnnnnnnnnnnnnnnnnnnnnnnnnnnnnnnnnnnnnnnnnnnnnnnnnnnnnnnnnnnnnnnnnnnnnnnnnnnnnnnnnnnnnnnnnnnnnnnnnnnnnnnnnnnnnnnnnnnnnnnnnnnnnnnnnnnnnnnnnnnnnnnnnnnnnnnnnnnnnnnnnnnnnnnnnnnnnnnnnnnnnnnnnnnnnnnnnnnnnnnnnnnnnnnnnnnnnnnnnnnnnnnnnnnnnnnnnnnnnnnnnnnnnnnnnnnnnnnnnnnnnnnnnnnnnnnnnnnnnnnnnnnnnnnnnnnnnnnnnnnnnnnnnnnnnnnnnnnnnnnnnnnnnnnnnnnnnnnnnnnnnnnnnnnnnnnnnnnnnnnnnnnnnnnnnnnnnnnnnnnnnnnnnnnnnnnnnnnnnnnnnnnnnnnnnnnnnnnnnnnnnnnnnnnnnnnnnnnnnnnnnnnnnnnnnnnnnnnnnnnnnnnnnnnnnnnnnnnnnnnnnnnnnnnnnnnnnnnnnnnnnnnnnnnnnnnnnnnnnnnnnnnnnnnnnnnnnnnnnnnnnnnnnnnnnnnnnnnnnnnnnnnnnnnnnnnnnnnnnnnnnnnnnnnnnnnnnnnnnnnnnnnnnnnnnnnnnnnnnnnnnnnnnnnnnnnnnnnnnnnnnnnnnnnnnnnnnnnnnnnnnnnnnnnnnnnnnnnnnnnnnnnnnnnnnnnnnnnnnnnnnnnnnnnnnnnnnnnnnnnnnnnnnnnnnnnnnnnnnnnnnnnnnnnnnnnnnnnnnnnnnnnnnnnnnnnnnnnnnnnnnnnnnnnnnnnnnnnnnnnnnnnnnnnnnnnnnnnnnnnnnnnnnnnnnnnnnnnnnnnnnnnnnnnnnnnnnnnnnnnnnnnnnnnnnnnnnnnnnnnnnnnnnnnnnnnnnnnnnnnnnnnnnnnnnnnnnnnnnnnnnnnnnnnnnnnnnnnnnnnnnnnnnnnnnnnnnnnnnnnnnnnnnnnnnnnnnnnnnnnnnnnnnnnnnnnnnnnnnnnnnnnnnnnnnnnnnnnnnnnnnnnnnnnnnnnnnnnnnnnnnnnnnnnnnnnnnnnnnnnnnnnnnnnnnnnnnnnnnnnnnnnnnnnnnnnnnnnnnnnnnnnnnnnnnnnnnnnnnnnnnnnnnnnnnnnnnnnnnnnnnnnnnnnnnnnnnnnnnnnnnnnnnnnnnnnnnnnnnnnnnnnnnnnnnnnnnnnnnnnnnnnnnnnnnnnnnnnnnnnnnnnnnnnnnnnnnnnnnnnnnnnnnnnnnnnnnnnnnnnnnnnnnnnnnnnnnnnnnnnnnnnnnnnnnnnnnnnnnnnnnnnnnnnnnnnnnnnnnnnnnnnnnnnnnnnnnnnnnnnnnnnnnnnnnnnnnnnnnnnnnnnnnnnnnnnnnnnnnnnnnnnnnnnnnnnnnnnnnnnnnnnnnnnnnnnnnnnnnnnnnnnnnnnnnnnnnnnnnnnnnnnnnnnnnnnnnnnnnnnnnnnnnnnnnnnnnnnnnnnnnnnnnnnnnnnnnnnnnnnnnnnnnnnnnnnnnnnnnnnnnnnnnnnnnnnnnnnnnnnnnnnnnnnnnnnnnnnnnnnnnnnnnnnnnnnnnnnnnnnnnnnnnnnnnnnnnnnnnnnnnnnnnnnnnnnnnnnnnnnnnnnnnnnnnnnnnnnnnnnnnnnnnnnnnnnnnnnnnnnnnnnnnnnnnnnnnnnnnnnnnnnnnnnnnnnnnnnnnnnnnnnnnnnnnnnnnnnnnnnnnnnnnnnnnnnnnnnnnnnnnnnnnnnnnnnnnnnnnnnnnnnnnnnnnnnnnnnnnnnnnnnnnnnnnnnnnnnnnnnnnnnnnnnnnnnnnnnnnnnnnnnnnnnnnnnnnnnnnnnnnnnnnnnnnnnnnnnnnnnnnnnnnnnnnnnnnnnnnnnnnnnnnnnnnnnnnnnnnnnnnnnnnnnnnnnnnnnnnnnnnnnnnnnnnnnnnnnnnnnnnnnnnnnnnnnnnnnnnnnnnnnnnnnnnnnnnnnnnnnnnnnnnnnnnnnnnnnnnnnnnnnnnnnnnnnnnnnnnnnnnnnnnnnnnnnnnnnnnnnnnnnnnnnnnnnnnnnnnnnnnnnnnnnnnnnnnnnnnnnnnnnnnnnnnnnnnnnnnnnnnnnnnnnnnnnnnnnnnnnnnnnnnnnnnnnnnnnnnnnnnnnnnnnnnnnnnnnnnnnnnnnnnnnnnnnnnnnnnnnnnnnnnnnnnnnnnnnnnnnnnnnnnnnnnnnnnnnnnnnnnnnnnnnnnnnnnnnnnnnnnnnnnnnnnnnnnnnnnnnnnnnnnnnnnnnnnnnnnnnnnnnnnnnnnnnnnnnnnnnnnnnnnnnnnnnnnnnnnnnnnnnnnnnnnnnnnnnnnnnnnnnnnnnnnnnnnnnnnnnnnnnnnnnnnnnnnnnnnnnnnnnnnnnnnnnnnnnnnnnnnnnnnnnnnnnnnnnnnnnnnnnnnnnnnnnnnnnnnnnnnnnnnnnnnnnnnnnnnnnnnnnnnnnnnnnnnnnnnnnnnnnnnnnnnnnnnnnnnnnnnnnnnnnnnnnnnnnnnnnnnnnnnnnnnnnnnnnnnnnnnnnnnnnnnnnnnnnnnnnnnnnnnnnnnnnnnnnnnnnnnnnnnnnnnnnnnnnnnnnnnnnnnnnnnnnnnnnnnnnnnnnnnnnnnnnnnnnnnnnnnnnnnnnnnnnnnnnnnnnnnnnnnnnnnnnnnnnnnnnnnnnnnnnnnnnnnnnnnnnnnnnnnnnnnnnnnnnnnnnnnnnnnnnnnnnnnnnnnnnnnnnnnnnnnnnnnnnnnnnnnnnnnnnnnnnnnnnnnnnnnnnnnnnnnnnnnnnnnnnnnnnnnnnnnnnnnnnnnnnnnnnnnnnnnnnnnnnnnnnnnnnnnnnnnnnnnnnnnnnnnnnnnnnnnnnnnnnnnnnnnnnnnnnnnnnnnnnnnnnnnnnnnnnnnnnnnnnnnnnnnnnnnnnnnnnnnnnnnnnnnnnnnnnnnnnnnnnnnnnnnnnnnnnnnnnnnnnnnnnnnnnnnnnnnnnnnnnnnnnnnnnnnnnnnnnnnnnnnnnnnnnnnnnnnnnnnnnnnnnnnnnnnnnnnnnnnnnnnnnnnnnnnnnnnnnnnnnnnnnnnnnnnnnnnnnnnnnnnnnnnnnnnnnnnnnnnnnnnnnnnnnnnnnnnnnnnnnnnnnnnnnnnnnnnnnnnnnnnnnnnnnnnnnnnnnnnnnnnnnnnnnnnnnnnnnnnnnnnnnnnnnnnnnnnnnnnnnnnnnnnnnnnnnnnnnnnnnnnnnnnnnnnnnnnnnnnnnnnnnnnnnnnnnnnnnnnnnnnnnnnnnnnnnnnnnnnnnnnnnnnnnnnnnnnnnnnnnnnnnnnnnnnnnnnnnnnnnnnnnnnnnnnnnnnnnnnnnnnnnnnnnnnnnnnnnnnnnnnnnnnnnnnnnnnnnnnnnnnnnnnnnnnnnnnnnnnnnnnnnnnnnnnnnnnnnnnnnnnnnnnnnnnnnnnnnnnnnnnnnnnnnnnnnnnnnnnnnnnnnnnnnnnnnnnnnnnnnnnnnnnnnnnnnnnnnnnnnnnnnnnnnnnnnnnnnnnnnnnnnnnnnnnnnnnnnnnnnnnnnnnnnnnnnnnnnnnnnnnnnnnnnnnnnnnnnnnnnnnnnnnnnnnnnnnnnnnnnnnnnnnnnnnnnnnnnnnnnnnnnnnnnnnnnnnnnnnnnnnnnnnnnnnnnnnnnnnnnnnnnnnnnnnnnnnnnnnnnnnnnnnnnnnnnnnnnnnnnnnnnnnnnnnnnnnnnnnnnnnnnnnnnnnnnnnnnnnnnnnnnnnnnnnnnnnnnnnnnnnnnnnnnnnnnnnnnnnnnnnnnnnnnnnnnnnnnnnnnnnnnnnnnnnnnnnnnnnnnnnnnnnnnnnnnnnnnnnnnnnnnnnnnnnnnnnnnnnnnnnnnnnnnnnnnnnnnnnnnnnnnnnnnnnnnnnnnnnnnnnnnnnnnnnnnnnnnnnnnnnnnnnnnnnnnnnnnnnnnnnnnnnnnnnnnnnnnnnnnnnnnnnnnnnnnnnnnnnnnnnnnnnnnnnnnnnnnnnnnnnnnnnnnnnnnnnnnnnnnnnnnnnnnnnnnnnnnnnnnnnnnnnnnnnnnnnnnnnnnnnnnnnnnnnnnnnnnnnnnnnnnnnnnnnnnnnnnnnnnnnnnnnnnnnnnnnnnnnnnnnnnnnnnnnnnnnnnnnnnnnnnnnnnnnnnnnnnnnnnnnnnnnnnnnnnnnnnnnnnnnnnnnnnnnnnnnnnnnnnnnnnnnnnnnnnnnnnnnnnnnnnnnnnnnnnnnnnnnnnnnnnnnnnnnnnnnnnnnnnnnnnnnnnnnnnnnnnnnnnnnnnnnnnnnnnnnnnnnnnnnnnnnnnnnnnnnnnnnnnnnnnnnnnnnnnnnnnnnnnnnnnnnnnnnnnnnnnnnnnnnnnnnnnnnnnnnnnnnnnnnnnnnnnnnnnnnnnnnnnnnnnnnnnnnnnnnnnnnnnnnnnnnnnnnnnnnnnnnnnnnnnnnnnnnnnnnnnnnnnnnnnnnnnnnnnnnnnnnnnnnnnnnnnnnnnnnnnnnnnnnnnnnnnnnnnnnnnnnnnnnnnnnnnnnnnnnnnnnnnnnnnnnnnnnnnnnnnnnnnnnnnnnnnnnnnnnnnnnnnnnnnnnnnnnnnnnnnnnnnnnnnnnnnnnnnnnnnnnnnnnnnnnnnnnnnnnnnnnnnnnnnnnnnnnnnnnnnnnnnnnnnnnnnnnnnnnnnnnnnnnnnnnnnnnnnnnnnnnnnnnnnnnnnnnnnnnnnnnnnnnnnnnnnnnnnnnnnnnnnnnnnnnnnnnnnnnnnnnnnnnnnnnnnnnnnnnnnnnnnnnnnnnnnnnnnnnnnnnnnnnnnnnnnnnnnnnnnnnnnnnnnnnnnnnnnnnnnnnnnnnnnnnnnnnnnnnnnnnnnnnnnnnnnnnnnnnnnnnnnnnnnnnnnnnnnnnnnnnnnnnnnnnnnnnnnnnnnnnnnnnnnnnnnnnnnnnnnnnnnnnnnnnnnnnnnnnnnnnnnnnnnnnnnnnnnnnnnnnnnnnnnnnnnnnnnnnnnnnnnnnnnnnnnnnnnnnnnnnnnnnnnnnnnnnnnnnnnnnnnnnnnnnnnnnnnnnnnnnnnnnnnnnnnnnnnnnnnnnnnnnnnnnnnnnnnnnnnnnnnnnnnnnnnnnnnnnnnnnnnnnnnnnnnnnnnnnnnnnnnnnnnnnnnnnnnnnnnnnnnnnnnnnnnnnnnnnnnnnnnnnnnnnnnnnnnnnnnnnnnnnnnnnnnnnnnnnnnnnnnnnnnnnnnnnnnnnnnnnnnnnnnnnnnnnnnnnnnnnnnnnnnnnnnnnnnnnnnnnnnnnnnnnnnnnnnnnnnnnnnnnnnnnnnnnnnnnnnnnnnnnnnnnnnnnnnnnnnnnnnnnnnnnnnnnnnnnnnnnnnnnnnnnnnnnnnnnnnnnnnnnnnnnnnnnnnnnnnnnnnnnnnnnnnnnnnnnnnnnnnnnnnnnnnnnnnnnnnnnnnnnnnnnnnnnnnnnnnnnnnnnnnnnnnnnnnnnnnnnnnnnnnnnnnnnnnnnnnnnnnnnnnnnnnnnnnnnnnnnnnnnnnnnnnnnnnnnnnnnnnnnnnnnnnnnnnnnnnnnnnnnnnnnnnnnnnnnnnnnnnnnnnnnnnnnnnnnnnnnnnnnnnnnnnnnnnnnnnnnnnnnnnnnnnnnnnnnnnnnnnnnnnnnnnnnnnnnnnnnnnnnnnnnnnnnnnnnnnnnnnnnnnnnnnnnnnnnnnnnnnnnnnnnnnnnnnnnnnnnnnnnnnnnnnnnnnnnnnnnnnnnnnnnnnnnnnnnnnnnnnnnnnnnnnnnnnnnnnnnnnnnnnnnnnnnnnnnnnnnnnnnnnnnnnnnnnnnnnnnnnnnnnnnnnnnnnnnnnnnnnnnnnnnnnnnnnnnnnnnnnnnnnnnnnnnnnnnnnnnnnnnnnnnnnnnnnnnnnnnnnnnnnnnnnnnnnnnnnnnnnnnnnnnnnnnnnnnnnnnnnnnnnnnnnnnnnnnnnnnnnnnnnnnnnnnnnnnnnnnnnnnnnnnnnnnnnnnnnnnnnnnnnnnnnnnnnnnnnnnnnnnnnnnnnnnnnnnnnnnnnnnnnnnnnnnnnnnnnnnnnnnnnnnnnnnnnnnnnnnnnnnnnnnnnnnnnnnnnnnnnnnnnnnnnnnnnnnnnnnnnnnnnnnnnnnnnnnnnnnnnnnnnnnnnnnnnnnnnnnnnnnnnnnnnnnnnnnnnnnnnnnnnnnnnnnnnnnnnnnnnnnnnnnnnnnnnnnnnnnnnnnnnnnnnnnnnnnnnnnnnnnnnnnnnnnnnnnnnnnnnnnnnnnnnnnnnnnnnnnnnnnnnnnnnnnnnnnnnnnnnnnnnnnnnnnnnnnnnnnnnnnnnnnnnnnnnnnnnnnnnnnnnnnnnnnnnnnnnnnnnnnnnnnnnnnnnnnnnnnnnnnnnnnnnnnnnnnnnnnnnnnnnnnnnnnnnnnnnnnnnnnnnnnnnnnnnnnnnnnnnnnnnnnnnnnnnnnnnnnnnnnnnnnnnnnnnnnnnnnnnnnnnnnnnnnnnnnnnnnnnnnnnnnnnnnnnnnnnnnnnnnnnnnnnnnnnnnnnnnnnnnnnnnnnnnnnnnnnnnnnnnnnnnnnnnnnnnnnnnnnnnnnnnnnnnnnnnnnnnnnnnnnnnnnnnnnnnnnnnnnnnnnnnnnnnnnnnnnnnnnnnnnnnnnnnnnnnnnnnnnnnnnnnnnnnnnnnnnnnnnnnnnnnnnnnnnnnnnnnnnnnnnnnnnnnnnnnnnnnnnnnnnnnnnnnnnnnnnnnnnnnnnnnnnnnnnnnnnnnnnnnnnnnnnnnnnnnnnnnnnnnnnnnnnnnnnnnnnnnnnnnnnnnnnnnnnnnnnnnnnnnnnnnnnnnnnnnnnnnnnnnnnnnnnnnnnnnnnnnnnnnnnnnnnnnnnnnnnnnnnnnnnnnnnnnnnnnnnnnnnnnnnnnnnnnnnnnnnnnnnnnnnnnnnnnnnnnnnnnnnnnnnnnnnnnnnnnnnnnnnnnnnnnnnnnnnnnnnnnnnnnnnnnnnnnnnnnnnnnnnnnnnnnnnnnnnnnnnnnnnnnnnnnnnnnnnnnnnnnnnnnnnnnnnnnnnnnnnnnnnnnnnnnnnnnnnnnnnnnnnnnnnnnnnnnnnnnnnnnnnnnnnnnnnnnnnnnnnnnnnnnnnnnnnnnnnnnnnnnnnnnnnnnnnnnnnnnnnnnnnnnnnnnnnnnnnnnnnnnnnnnnnnnnnnnnnnnnnnnnnnnnnnnnnnnnnnnnnnnnnnnnnnnnnnnnnnnnnnnnnnnnnnnnnnnnnnnnnnnnnnnnnnnnnnnnnnnnnnnnnnnnnnnnnnnnnnnnnnnnnnnnnnnnnnnnnnnnnnnnnnnnnnnnnnnnnnnnnnnnnnnnnnnnnnnnnnnnnnnnnnnnnnnnnnnnnnnnnnnnnnnnnnnnnnnnnnnnnnnnnnnnnnnnnnnnnnnnnnnnnnnnnnnnnnnnnnnnnnnnnnnnnnnnnnnnnnnnnnnnnnnnnnnnnnnnnnnnnnnnnnnnnnnnnnnnnnnnnnnnnnnnnnnnnnnnnnnnnnnnnnnnnnnnnnnnnnnnnnnnnnnnnnnnnnnnnnnnnnnnnnnnnnnnnnnnnnnnnnnnnnnnnnnnnnnnnnnnnnnnnnnnnnnnnnnnnnnnnnnnnnnnnnnnnnnnnnnnnnnnnnnnnnnnnnnnnnnnnnnnnnnnnnnnnnnnnnnnnnnnnnnnnnnnnnnnnnnnnnnnnnnnnnnnnnnnnnnnnnnnnnnnnnnnnnnnnnnnnnnnnnnnnnnnnnnnnnnnnnnnnnnnnnnnnnnnnnnnnnnnnnnnnnnnnnnnnnnnnnnnnnnnnnnnnnnnnnnnnnnnnnnnnnnnnnnnnnnnnnnnnnnnnnnnnnnnnnnnnnnnnnnnnnnnnnnnnnnnnnnnnnnnnnnnnnnnnnnnnnnnnnnnnnnnnnnnnnnnnnnnnnnnnnnnnnnnnnnnnnnnnnnnnnnnnnnnnnnnnnnnnnnnnnnnnnnnnnnnnnnnnnnnnnnnnnnnnnnnnnnnnnnnnnnnnnnnnnnnnnnnnnnnnnnnnnnnnnnnnnnnnnnnnnnnnnnnnnnnnnnnnnnnnnnnnnnnnnnnnnnnnnnnnnnnnnnnnnnnnnnnnnnnnnnnnnnnnnnnnnnnnnnnnnnnnnnnnnnnnnnnnnnnnnnnnnnnnnnnnnnnnnnnnnnnnnnnnnnnnnnnnnnnnnnnnnnnnnnnnnnnnnnnnnnnnnnnnnnnnnnnnnnnnnnnnnnnnnnnnnnnnnnnnnnnnnnnnnnnnnnnnnnnnnnnnnnnnnnnnnnnnnnnnnnnnnnnnnnnnnnnnnnnnnnnnnnnnnnnnnnnnnnnnnnnnnnnnnnnnnnnnnnnnnnnnnnnnnnnnnnnnnnnnnnnnnnnnnnnnnnnnnnnnnnnnnnnnnnnnnnnnnnnnnnnnnnnnnnnnnnnnnnnnnnnnnnnnnnnnnnnnnnnnnnnnnnnnnnnnnnnnnnnnnnnnnnnnnnnnnnnnnnnnnnnnnnnnnnnnnnnnnnnnnnnnnnnnnnnnnnnnnnnnnnnnnnnnnnnnnnnnnnnnnnnnnnnnnnnnnnnnnnnnnnnnnnnnnnnnnnnnnnnnnnnnnnnnnnnnnnnnnnnnnnnnnnnnnnnnnnnnnnnnnnnnnnnnnnnnnnnnnnnnnnnnnnnnnnnnnnnnnnnnnnnnnnnnnnnnnnnnnnnnnnnnnnnnnnnnnnnnnnnnnnnnnnnnnnnnnnnnnnnnnnnnnnnnnnnnnnnnnnnnnnnnnnnnnnnnnnnnnnnnnnnnnnnnnnnnnnnnnnnnnnnnnnnnnnnnnnnnnnnnnnnnnnnnnnnnnnnnnnnnnnnnnnnnnnnnnnnnnnnnnnnnnnnnnnnnnnnnnnnnnnnnnnnnnnnnnnnnnnnnnnnnnnnnnnnnnnnnnnnnnnnnnnnnnnnnnnnnnnnnnnnnnnnnnnnnnnnnnnnnnnnnnnnnnnnnnnnnnnnnnnnnnnnnnnnnnnnnnnnnnnnnnnnnnnnnnnnnnnnnnnnnnnnnnnnnnnnnnnnnnnnnnnnnnnnnnnnnnnnnnnnnnnnnnnnnnnnnnnnnnnnnnnnnnnnnnnnnnnnnnnnnnnnnnnnnnnnnnnnnnnnnnnnnnnnnnnnnnnnnnnnnnnnnnnnnnnnnnnnnnnnnnnnnnnnnnnnnnnnnnnnnnnnnnnnnnnnnnnnnnnnnnnnnnnnnnnnnnnnnnnnnnnnnnnnnnnnnnnnnnnnnnnnnnnnnnnnnnnnnnnnnnnnnnnnnnnnnnnnnnnnnnnnnnnnnnnnnnnnnnnnnnnnnnnnnnnnnnnnnnnnnnnnnnnnnnnnnnnnnnnnnnnnnnnnnnnnnnnnnnnnnnnnnnnnnnnnnnnnnnnnnnnnnnnnnnnnnnnnnnnnnnnnnnnnnnnnnnnnnnnnnnnnnnnnnnnnnnnnnnnnnnnnnnnnnnnnnnnnnnnnnnnnnnnnnnnnnnnnnnnnnnnnnnnnnnnnnnnnnnnnnnnnnnnnnnnnnnnnnnnnnnnnnnnnnnnnnnnnnnnnnnnnnnnnnnnnnnnnnnnnnnnnnnnnnnnnnnnnnnnnnnnnnnnnnnnnnnnnnnnnnnnnnnnnnnnnnnnnnnnnnnnnnnnnnnnnnnnnnnnnnnnnnnnnnnnnnnnnnnnnnnnnnnnnnnnnnnnnnnnnnnnnnnnnnnnnnnnnnnnnnnnnnnnnnnnnnnnnnnnnnnnnnnnnnnnnnnnnnnnnnnnnnnnnnnnnnnnnnnnnnnnnnnnnnnnnnnnnnnnnnnnnnnnnnnnnnnnnnnnnnnnnnnnnnnnnnnnnnnnnnnnnnnnnnnnnnnnnnnnnnnnnnnnnnnnnnnnnnnnnnnnnnnnnnnnnnnnnnnnnnnnnnnnnnnnnnnnnnnnnnnnnnnnnnnnnnnnnnnnnnnnnnnnnnnnnnnnnnnnnnnnnnnnnnnnnnnnnnnnnnnnnnnnnnnnnnnnnnnnnnnnnnnnnnnnnnnnnnnnnnnnnnnnnnnnnnnnnnnnnnnnnnnnnnnnnnnnnnnnnnnnnnnnnnnnnnnnnnnnnnnnnnnnnnnnnnnnnnnnnnnnnnnnnnnnnnnnnnnnnnnnnnnnnnnnnnnnnnnnnnnnnnnnnnnnnnnnnnnnnnnnnnnnnnnnnnnnnnnnnnnnnnnnnnnnnnnnnnnnnnnnnnnnnnnnnnnnnnnnnnnnnnnnnnnnnnnnnnnnnnnnnnnnnnnnnnnnnnnnnnnnnnnnnnnnnnnnnnnnnnnnnnnnnnnnnnnnnnnnnnnnnnnnnnnnnnnnnnnnnnnnnnnnnnnnnnnnnnnnnnnnnnnnnnnnnnnnnnnnnnnnnnnnnnnnnnnnnnnnnnnnnnnnnnnnnnnnnnnnnnnnnnnnnnnnnnnnnnnnnnnnnnnnnnnnnnnnnnnnnnnnnnnnnnnnnnnnnnnnnnnnnnnnnnnnnnnnnnnnnnnnnnnnnnnnnnnnnnnnnnnnnnnnnnnnnnnnnnnnnnnnnnnnnnnnnnnnnnnnnnnnnnnnnnnnnnnnnnnnnnnnnnnnnnnnnnnnnnnnnnnnnnnnnnnnnnnnnnnnnnnnnnnnnnnnnnnnnnnnnnnnnnnnnnnnnnnnnnnnnnnnnnnnnnnnnnnnnnnnnnnnnnnnnnnnnnnnnnnnnnnnnnnnnnnnnnnnnnnnnnnnnnnnnnnnnnnnnnnnnnnnnnnnnnnnnnnnnnnnnnnnnnnnnnnnnnnnnnnnnnnnnnnnnnnnnnnnnnnnnnnnnnnnnnnnnnnnnnnnnnnnnnnnnnnnnnnnnnnnnnnnnnnnnnnnnnnnnnnnnnnnnnnnnnnnnnnnnnnnnnnnnnnnnnnnnnnnnnnnnnnnnnnnnnnnnnnnnnnnnnnnnnnnnnnnnnnnnnnnnnnnnnnnnnnnnnnnnnnnnnnnnnnnnnnnnnnnnnnnnnnnnnnnnnnnnnnnnnnnnnnnnnnnnnnnnnnnnnnnnnnnnnnnnnnnnnnnnnnnnnnnnnnnnnnnnnnnnnnnnnnnnnnnnnnnnnnnnnnnnnnnnnnnnnnnnnnnnnnnnnnnnnnnnnnnnnnnnnnnnnnnnnnnnnnnnnnnnnnnnnnnnnnnnnnnnnnnnnnnnnnnnnnnnnnnnnnnnnnnnnnnnnnnnnnnnnnnnnnnnnnnnnnnnnnnnnnnnnnnnnnnnnnnnnnnnnnnnnnnnnnnnnnnnnnnnnnnnnnnnnnnnnnnnnnnnnnnnnnnnnnnnnnnnnnnnnnnnnnnnnnnnnnnnnnnnnnnnnnnnnnnnnnnnnnnnnnnnnnnnnnnnnnnnnnnnnnnnnnnnnnnnnnnnnnnnnnnnnnnnnnnnnnnnnnnnnnnnnnnnnnnnnnnnnnnnnnnnnnnnnnnnnnnnnnnnnnnnnnnnnnnnnnnnnnnnnnnnnnnnnnnnnnnnnnnnnnnnnnnnnnnnnnnnnnnnnnnnnnnnnnnnnnnnnnnnnnnnnnnnnnnnnnnnnnnnnnnnnnnnnnnnnnnnnnnnnnnnnnnnnnnnnnnnnnnnnnnnnnnnnnnnnnnnnnnnnnnnnnnnnnnnnnnnnnnnnnnnnnnnnnnnnnnnnnnnnnnnnnnnnnnnnnnnnnnnnnnnnnnnnnnnnnnnnnnnnnnnnnnnnnnnnnnnnnnnnnnnnnnnnnnnnnnnnnnnnnnnnnnnnnnnnnnnnnnnnnnnnnnnnnnnnnnnnnnnnnnnnnnnnnnnnnnnnnnnnnnnnnnnnnnnnnnnnnnnnnnnnnnnnnnnnnnnnnnnnnnnnnnnnnnnnnnnnnnnnnnnnnnnnnnnnnnnnnnnnnnnnnnnnnnnnnnnnnnnnnnnnnnnnnnnnnnnnnnnnnnnnnnnnnnnnnnnnnnnnnnnnnnnnnnnnnnnnnnnnnnnnnnnnnnnnnnnnnnnnnnnnnnnnnnnnnnnnnnnnnnnnnnnnnnnnnnnnnnnnnnnnnnnnnnnnnnnnnnnnnnnnnnnnnnnnnnnnnnnnnnnnnnnnnnnnnnnnnnnnnnnnnnnnnnnnnnnnnnnnnnnnnnnnnnnnnnnnnnnnnnnnnnnnnnnnnnnnnnnnnnnnnnnnnnnnnnnnnnnnnnnnnnnnnnnnnnnnnnnnnnnnnnnnnnnnnnnnnnnnnnnnnnnnnnnnnnnnnnnnnnnnnnnnnnnnnnnnnnnnnnnnnnnnnnnnnnnnnnnnnnnnnnnnnnnnnnnnnnnnnnnnnnnnnnnnnnnnnnnnnnnnnnnnnnnnnnnnnnnnnnnnnnnnnnnnnnnnnnnnnnnnnnnnnnnnnnnnnnnnnnnnnnnnnnnnnnnnnnnnnnnnnnnnnnnnnnnnnnnnnnnnnnnnnnnnnnnnnnnnnnnnnnnnnnnnnnnnnnnnnnnnnnnnnnnnnnnnnnnnnnnnnnnnnnnnnnnnnnnnnnnnnnnnnnnnnnnnnnnnnnnnnnnnnnnnnnnnnnnnnnnnnnnnnnnnnnnnnnnnnnnnnnnnnnnnnnnnnnnnnnnnnnnnnnnnnnnnnnnnnnnnnnnnnnnnnnnnnnnnnnnnnnnnnnnnnnnnnnnnnnnnnnnnnnnnnnnnnnnnnnnnnnnnnnnnnnnnnnnnnnnnnnnnnnnnnnnnnnnnnnnnnnnnnnnnnnnnnnnnnnnnnnnnnnnnnnnnnnnnnnnnnnnnnnnnnnnnnnnnnnnnnnnnnnnnnnnnnnnnnnnnnnnnnnnnnnnnnnnnnnnnnnnnnnnnnnnnnnnnnnnnnnnnnnnnnnnnnnnnnnnnnnnnnnnnnnnnnnnnnnnnnnnnnnnnnnnnnnnnnnnnnnnnnnnnnnnnnnnnnnnnnnnnnnnnnnnnnnnnnnnnnnnnnnnnnnnnnnnnnnnnnnnnnnnnnnnnnnnnnnnnnnnnnnnnnnnnnnnnnnnnnnnnnnnnnnnnnnnnnnnnnnnnnnnnnnnnnnnnnnnnnnnnnnnnnnnnnnnnnnnnnnnnnnnnnnnnnnnnnnnnnnnnnnnnnnnnnnnnnnnnnnnnnnnnnnnnnnnnnnnnnnnnnnnnnnnnnnnnnnnnnnnnnnnnnnnnnnnnnnnnnnnnnnnnnnnnnnnnnnnnnnnnnnnnnnnnnnnnnnnnnnnnnnnnnnnnnnnnnnnnnnnnnnnnnnnnnnnnnnnnnnnnnnnnnnnnnnnnnnnnnnnnnnnnnnnnnnnnnnnnnnnnnnnnnnnnnnnnnnnnnnnnnnnnnnnnnnnnnnnnnnnnnnnnnnnnnnnnnnnnnnnnnnnnnnnnnnnnnnnnnnnnnnnnnnnnnnnnnnnnnnnnnnnnnnnnnnnnnnnnnnnnnnnnnnnnnnnnnnnnnnnnnnnnnnnnnnnnnnnnnnnnnnnnnnnnnnnnnnnnnnnnnnnnnnnnnnnnnnnnnnnnnnnnnnnnnnnnnnnnnnnnnnnnnnnnnnnnnnnnnnnnnnnnnnnnnnnnnnnnnnnnnnnnnnnnnnnnnnnnnnnnnnnnnnnnnnnnnnnnnnnnnnnnnnnnnnnnnnnnnnnnnnnnnnnnnnnnnnnnnnnnnnnnnnnnnnnnnnnnnnnnnnnnnnnnnnnnnnnnnnnnnnnnnnnnnnnnnnnnnnnnnnnnnnnnnnnnnnnnnnnnnnnnnnnnnnnnnnnnnnnnnnnnnnnnnnnnnnnnnnnnnnnnnnnnnnnnnnnnnnnnnnnnnnnnnnnnnnnnnnnnnnnnnnnnnnnnnnnnnnnnnnnnnnnnnnnnnnnnnnnnnnnnnnnnnnnnnnnnnnnnnnnnnnnnnnnnnnnnnnnnnnnnnnnnnnnnnnnnnnnnnnnnnnnnnnnnnnnnnnnnnnnnnnnnnnnnnnnnnnnnnnnnnnnnnnnnnnnnnnnnnnnnnnnnnnnnnnnnnnnnnnnnnnnnnnnnnnnnnnnnnnnnnnnnnnnnnnnnnnnnnnnnnnnnnnnnnnnnnnnnnnnnnnnnnnnnnnnnnnnnnnnnnnnnnnnnnnnnnnnnnnnnnnnnnnnnnnnnnnnnnnnnnnnnnnnnnnnnnnnnnnnnnnnnnnnnnnnnnnnnnnnnnnnnnnnnnnnnnnnnnnnnnnnnnnnnnnnnnnnnnnnnnnnnnnnnnnnnnnnnnnnnnnnnnnnnnnnnnnnnnnnnnnnnnnnnnnnnnnnnnnnnnnnnnnnnnnnnnnnnnnnnnnnnnnnnnnnnnnnnnnnnnnnnnnnnnnnnnnnnnnnnnnnnnnnnnnnnnnnnnnnnnnnnnnnnnnnnnnnnnnnnnnnnnnnnnnnnnnnnnnnnnnnnnnnnnnnnnnnnnnnnnnnnnnnnnnnnnnnnnnnnnnnnnnnnnnnnnnnnnnnnnnnnnnnnnnnnnnnnnnnnnnnnnnnnnnnnnnnnnnnnnnnnnnnnnnnnnnnnnnnnnnnnnnnnnnnnnnnnnnnnnnnnnnnnnnnnnnnnnnnnnnnnnnnnnnnnnnnnnnnnnnnnnnnnnnnnnnnnnnnnnnnnnnnnnnnnnnnnnnnnnnnnnnnnnnnnnnnnnnnnnnnnnnnnnnnnnnnnnnnnnnnnnnnnnnnnnnnnnnnnnnnnnnnnnnnnnnnnnnnnnnnnnnnnnnnnnnnnnnnnnnnnnnnnnnnnnnnnnnnnnnnnnnnnnnnnnnnnnnnnnnnnnnnnnnnnnnnnnnnnnnnnnnnnnnnnnnnnnnnnnnnnnnnnnnnnnnnnnnnnnnnnnnnnnnnnnnnnnnnnnnnnnnnnnnnnnnnnnnnnnnnnnnnnnnnnnnnnnnnnnnnnnnnnnnnnnnnnnnnnnnnnnnnnnnnnnnnnnnnnnnnnnnnnnnnnnnnnnnnnnnnnnnnnnnnnnnnnnnnnnnnnnnnnnnnnnnnnnnnnnnnnnnnnnnnnnnnnnnnnnnnnnnnnnnnnnnnnnnnnnnnnnnnnnnnnnnnnnnnnnnnnnnnnnnnnnnnnnnnnnnnnnnnnnnnnnnnnnnnnnnnnnnnnnnnnnnnnnnnnnnnnnnnnnnnnnnnnnnnnnnnnnnnnnnnnnnnnnnnnnnnnnnnnnnnnnnnnnnnnnnnnnnnnnnnnnnnnnnnnnnnnnnnnnnnnnnnnnnnnnnnnnnnnnnnnnnnnnnnnnnnnnnnnnnnnnnnnnnnnnnnnnnnnnnnnnnnnnnnnnnnnnnnnnnnnnnnnnnnnnnnnnnnnnnnnnnnnnnnnnnnnnnnnnnnnnnnnnnnnnnnnnnnnnnnnnnnnnnnnnnnnnnnnnnnnnnnnnnnnnnnnnnnnnnnnnnnnnnnnnnnnnnnnnnnnnnnnnnnnnnnnnnnnnnnnnnnnnnnnnnnnnnnnnnnnnnnnnnnnnnnnnnnnnnnnnnnnnnnnnnnnnnnnnnnnnnnnnnnnnnnnnnnnnnnnnnnnnnnnnnnnnnnnnnnnnnnnnnnnnnnnnnnnnnnnnnnnnnnnnnnnnnnnnnnnnnnnnnnnnnnnnnnnnnnnnnnnnnnnnnnnnnnnnnnnnnnnnnnnnnnnnnnnnnnnnnnnnnnnnnnnnnnnnnnnnnnnnnnnnnnnnnnnnnnnnnnnnnnnnnnnnnnnnnnnnnnnnnnnnnnnnnnnnnnnnnnnnnnnnnnnnnnnnnnnnnnnnnnnnnnnnnnnnnnnnnnnnnnnnnnnnnnnnnnnnnnnnnnnnnnnnnnnnnnnnnnnnnnnnnnnnnnnnnnnnnnnnnnnnnnnnnnnnnnnnnnnnnnnnnnnnnnnnnnnnnnnnnnnnnnnnnnnnnnnnnnnnnnnnnnnnnnnnnnnnnnnnnnnnnnnnnnnnnnnnnnnnnnnnnnnnnnnnnnnnnnnnnnnnnnnnnnnnnnnnnnnnnnnnnnnnnnnnnnnnnnnnnnnnnnnnnnnnnnnnnnnnnnnnnnnnnnnnnnnnnnnnnnnnnnnnnnnnnnnnnnnnnnnnnnnnnnnnnnnnnnnnnnnnnnnnnnnnnnnnnnnnnnnnnnnnnnnnnnnnnnnnnnnnnnnnnnnnnnnnnnnnnnnnnnnnnnnnnnnnnnnnnnnnnnnnnnnnnnnnnnnnnnnnnnnnnnnnnnnnnnnnnnnnnnnnnnnnnnnnnnnnnnnnnnnnnnnnnnnnnnnnnnnnnnnnnnnnnnnnnnnnnnnnnnnnnnnnnnnnnnnnnnnnnnnnnnnnnnnnnnnnnnnnnnnnnnnnnnnnnnnnnnnnnnnnnnnnnnnnnnnnnnnnnnnnnnnnnnnnnnnnnnnnnnnnnnnnnnnnnnnnnnnnnnnnnnnnnnnnnnnnnnnnnnnnnnnnnnnnnnnnnnnnnnnnnnnnnnnnnnnnnnnnnnnnnnnnnnnnnnnnnnnnnnnnnnnnnnnnnnnnnnnnnnnnnnnnnnnnnnnnnnnnnnnnnnnnnnnnnnnnnnnnnnnnnnnnnnnnnnnnnnnnnnnnnnnnnnnnnnnnnnnnnnnnnnnnnnnnnnnnnnnnnnnnnnnnnnnnnnnnnnnnnnnnnnnnnnnnnnnnnnnnnnnnnnnnnnnnnnnnnnnnnnnnnnnnnnnnnnnnnnnnnnnnnnnnnnnnnnnnnnnnnnnnnnnnnnnnnnnnnnnnnnnnnnnnnnnnnnnnnnnnnnnnnnnnnnnnnnnnnnnnnnnnnnnnnnnnnnnnnnnnnnnnnnnnnnnnnnnnnnnnnnnnnnnnnnnnnnnnnnnnnnnnnnnnnnnnnnnnnnnnnnnnnnnnnnnnnnnnnnnnnnnnnnnnnnnnnnnnnnnnnnnnnnnnnnnnnnnnnnnnnnnnnnnnnnnnnnnnnnnnnnnnnnnnnnnnnnnnnnnnnnnnnnnnnnnnnnnnnnnnnnnnnnnnnnnnnnnnnnnnnnnnnnnnnnnnnnnnnnnnnnnnnnnnnnnnnnnnnnnnnnnnnnnnnnnnnnnnnnnnnnnnnnnnnnnnnnnnnnnnnnnnnnnnnnnnnnnnnnnnnnnnnnnnnnnnnnnnnnnnnnnnnnnnnnnnnnnnnnnnnnnnnnnnnnnnnnnnnnnnnnnnnnnnnnnnnnnnnnnnnnnnnnnnnnnnnnnnnnnnnnnnnnnnnnnnnnnnnnnnnnnnnnnnnnnnnnnnnnnnnnnnnnnnnnnnnnnnnnnnnnnnnnnnnnnnnnnnnnnnnnnnnnnnnnnnnnnnnnnnnnnnnnnnnnnnnnnnnnnnnnnnnnnnnnnnnnnnnnnnnnnnnnnnnnnnnnnnnnnnnnnnnnnnnnnnnnnnnnnnnnnnnnnnnnnnnnnnnnnnnnnnnnnnnnnnnnnnnnnnnnnnnnnnnnnnnnnnnnnnnnnnnnnnnnnnnnnnnnnnnnnnnnnnnnnnnnnnnnnnnnnnnnnnnnnnnnnnnnnnnnnnnnnnnnnnnnnnnnnnnnnnnnnnnnnnnnnnnnnnnnnnnnnnnnnnnnnnnnnnnnnnnnnnnnnnnnnnnnnnnnnnnnnnnnnnnnnnnnnnnnnnnnnnnnnnnnnnnnnnnnnnnnnnnnnnnnnnnnnnnnnnnnnnnnnnnnnnnnnnnnnnnnnnnnnnnnnnnnnnnnnnnnnnnnnnnnnnnnnnnnnnnnnnnnnnnnnnnnnnnnnnnnnnnnnnnnnnnnnnnnnnnnnnnnnnnnnnnnnnnnnnnnnnnnnnnnnnnnnnnnnnnnnnnnnnnnnnnnnnnnnnnnnnnnnnnnnnnnnnnnnnnnnnnnnnnnnnnnnnnnnnnnnnnnnnnnnnnnnnnnnnnnnnnnnnnnnnnnnnnnnnnnnnnnnnnnnnnnnnnnnnnnnnnnnnnnnnnnnnnnnnnnnnnnnnnnnnnnnnnnnnnnnnnnnnnnnnnnnnnnnnnnnnnnnnnnnnnnnnnnnnnnnnnnnnnnnnnnnnnnnnnnnnnnnnnnnnnnnnnnnnnnnnnnnnnnnnnnnnnnnnnnnnnnnnnnnnnnnnnnnnnnnnnnnnnnnnnnnnnnnnnnnnnnnnnnnnnnnnnnnnnnnnnnnnnnnnnnnnnnnnnnnnnnnnnnnnnnnnnnnnnnnnnnnnnnnnnnnnnnnnnnnnnnnnnnnnnnnnnnnnnnnnnnnnnnnnnnnnnnnnnnnnnnnnnnnnnnnnnnnnnnnnnnnnnnnnnnnnnnnnnnnnnnnnnnnnnnnnnnnnnnnnnnnnnnnnnnnnnnnnnnnnnnnnnnnnnnnnnnnnnnnnnnnnnnnnnnnnnnnnnnnnnnnnnnnnnnnnnnnnnnnnnnnnnnnnnnnnnnnnnnnnnnnnnnnnnnnnnnnnnnnnnnnnnnnnnnnnnnnnnnnnnnnnnnnnnnnnnnnnnnnnnnnnnnnnnnnnnnnnnnnnnnnnnnnnnnnnnnnnnnnnnnnnnnnnnnnnnnnnnnnnnnnnnnnnnnnnnnnnnnnnnnnnnnnnnnnnnnnnnnnnnnnnnnnnnnnnnnnnnnnnnnnnnnnnnnnnnnnnnnnnnnnnnnnnnnnnnnnnnnnnnnnnnnnnnnnnnnnnnnnnnnnnnnnnnnnnnnnnnnnnnnnnnnnnnnnnnnnnnnnnnnnnnnnnnnnnnnnnnnnnnnnnnnnnnnnnnnnnnnnnnnnnnnnnnnnnnnnnnnnnnnnnnnnnnnnnnnnnnnnnnnnnnnnnnnnnnnnnnnnnnnnnnnnnnnnnnnnnnnnnnnnnnnnnnnnnnnnnnnnnnnnnnnnnnnnnnnnnnnnnnnnnnnnnnnnnnnnnnnnnnnnnnnnnnnnnnnnnnnnnnnnnnnnnnnnnnnnnnnnnnnnnnnnnnnnnnnnnnnnnnnnnnnnnnnnnnnnnnnnnnnnnnnnnnnnnnnnnnnnnnnnnnnnnnnnnnnnnnnnnnnnnnnnnnnnnnnnnnnnnnnnnnnnnnnnnnnnnnnnnnnnnnnnnnnnnnnnnnnnnnnnnnnnnnnnnnnnnnnnnnnnnnnnnnnnnnnnnnnnnnnnnnnnnnnnnnnnnnnnnnnnnnnnnnnnnnnnnnnnnnnnnnnnnnnnnnnnnnnnnnnnnnnnnnnnnnnnnnnnnnnnnnnnnnnnnnnnnnnnnnnnnnnnnnnnnnnnnnnnnnnnnnnnnnnnnnnnnnnnnnnnnnnnnnnnnnnnnnnnnnnnnnnnnnnnnnnnnnnnnnnnnnnnnnnnnnnnnnnnnnnnnnnnnnnnnnnnnnnnnnnnnnnnnnnnnnnnnnnnnnnnnnnnnnnnnnnnnnnnnnnnnnnnnnnnnnnnnnnnnnnnnnnnnnnnnnnnnnnnnnnnnnnnnnnnnnnnnnnnnnnnnnnnnnnnnnnnnnnnnnnnnnnnnnnnnnnnnnnnnnnnnnnnnnnnnnnnnnnnnnnnnnnnnnnnnnnnnnnnnnnnnnnnnnnnnnnnnnnnnnnnnnnnnnnnnnnnnnnnnnnnnnnnnnnnnnnnnnnnnnnnnnnnnnnnnnnnnnnnnnnnnnnnnnnnnnnnnnnnnnnnnnnnnnnnnnnnnnnnnnnnnnnnnnnnnnnnnnnnnnnnnnnnnnnnnnnnnnnnnnnnnnnnnnnnnnnnnnnnnnnnnnnnnnnnnnnnnnnnnnnnnnnnnnnnnnnnnnnnnnnnnnnnnnnnnnnnnnnnnnnnnnnnnnnnnnnnnnnnnnnnnnnnnnnnnnnnnnnnnnnnnnnnnnnnnnnnnnnnnnnnnnnnnnnnnnnnnnnnnnnnnnnnnnnnnnnnnnnnnnnnnnnnnnnnnnnnnnnnnnnnnnnnnnnnnnnnnnnnnnnnnnnnnnnnnnnnnnnnnnnnnnnnnnnnnnnnnnnnnnnnnnnnnnnnnnnnnnnnnnnnnnnnnnnnnnnnnnnnnnnnnnnnnnnnnnnnnnnnnnnnnnnnnnnnnnnnnnnnnnnnnnnnnnnnnnnnnnnnnnnnnnnnnnnnnnnnnnnnnnnnnnnnnnnnnnnnnnnnnnnnnnnnnnnnnnnnnnnnnnnnnnnnnnnnnnnnnnnnnnnnnnnnnnnnnnnnnnnnnnnnnnnnnnnnnnnnnnnnnnnnnnnnnnnnnnnnnnnnnnnnnnnnnnnnnnnnnnnnnnnnnnnnnnnnnnnnnnnnnnnnnnnnnnnnnnnnnnnnnnnnnnnnnnnnnnnnnnnnnnnnnnnnnnnnnnnnnnnnnnnnnnnnnnnnnnnnnnnnnnnnnnnnnnnnnnnnnnnnnnnnnnnnnnnnnnnnnnnnnnnnnnnnnnnnnnnnnnnnnnnnnnnnnnnnnnnnnnnnnnnnnnnnnnnnnnnnnnnnnnnnnnnnnnnnnnnnnnnnnnnnnnnnnnnnnnnnnnnnnnnnnnnnnnnnnnnnnnnnnnnnnnnnnnnnnnnnnnnnnnnnnnnnnnnnnnnnnnnnnnnnnnnnnnnnnnnnnnnnnnnnnnnnnnnnnnnnnnnnnnnnnnnnnnnnnnnnnnnnnnnnnnnnnnnnnnnnnnnnnnnnnnnnnnnnnnnnnnnnnnnnnnnnnnnnnnnnnnnnnnnnnnnnnnnnnnnnnnnnnnnnnnnnnnnnnnnnnnnnnnnnnnnnnnnnnnnnnnnnnnnnnnnnnnnnnnnnnnnnnnnnnnnnnnnnnnnnnnnnnnnnnnnnnnnnnnnnnnnnnnnnnnnnnnnnnnnnnnnnnnnnnnnnnnnnnnnnnnnnnnnnnnnnnnnnnnnnnnnnnnnnnnnnnnnnnnnnnnnnnnnnnnnnnnnnnnnnnnnnnnnnnnnnnnnnnnnnnnnnnnnnnnnnnnnnnnnnnnnnnnnnnnnnnnnnnnnnnnnnnnnnnnnnnnnnnnnnnnnnnnnnnnnnnnnnnnnnnnnnnnnnnnnnnnnnnnnnnnnnnnnnnnnnnnnnnnnnnnnnnnnnnnnnnnnnnnnnnnnnnnnnnnnnnnnnnnnnnnnnnnnnnnnnnnnnnnnnnnnnnnnnnnnnnnnnnnnnnnnnnnnnnnnnnnnnnnnnnnnnnnnnnnnnnnnnnnnnnnnnnnnnnnnnnnnnnnnnnnnnnnnnnnnnnnnnnnnnnnnnnnnnnnnnnnnnnnnnnnnnnnnnnnnnnnnnnnnnnnnnnnnnnnnnnnnnnnnnnnnnnnnnnnnnnnnnnnnnnnnnnnnnnnnnnnnnnnnnnnnnnnnnnnnnnnnnnnnnnnnnnnnnnnnnnnnnnnnnnnnnnnnnnnnnnnnnnnnnnnnnnnnnnnnnnnnnnnnnnnnnnnnnnnnnnnnnnnnnnnnnnnnnnnnnnnnnnnnnnnnnnnnnnnnnnnnnnnnnnnnnnnnnnnnnnnnnnnnnnnnnnnnnnnnnnnnnnnnnnnnnnnnnnnnnnnnnnnnnnnnnnnnnnnnnnnnnnnnnnnnnnnnnnnnnnnnnnnnnnnnnnnnnnnnnnnnnnnnnnnnnnnnnnnnnnnnnnnnnnnnnnnnnnnnnnnnnnnnnnnnnnnnnnnnnnnnnnnnnnnnnnnnnnnnnnnnnnnnnnnnnnnnnnnnnnnnnnnnnnnnnnnnnnnnnnnnnnnnnnnnnnnnnnnnnnnnnnnnnnnnnnnnnnnnnnnnnnnnnnnnnnnnnnnnnnnnnnnnnnnnnnnnnnnnnnnnnnnnnnnnnnnnnnnnnnnnnnnnnnnnnnnnnnnnnnnnnnnnnnnnnnnnnnnnnnnnnnnnnnnnnnnnnnnnnnnnnnnnnnnnnnnnnnnnnnnnnnnnnnnnnnnnnnnnnnnnnnnnnnnnnnnnnnnnnnnnnnnnnnnnnnnnnnnnnnnnnnnnnnnnnnnnnnnnnnnnnnnnnnnnnnnnnnnnnnnnnnnnnnnnnnnnnnnnnnnnnnnnnnnnnnnnnnnnnnnnnnnnnnnnnnnnnnnnnnnnnnnnnnnnnnnnnnnnnnnnnnnnnnnnnnnnnnnnnnnnnnnnnnnnnnnnnnnnnnnnnnnnnnnnnnnnnnnnnnnnnnnnnnnnnnnnnnnnnnnnnnnnnnnnnnnnnnnnnnnnnnnnnnnnnnnnnnnnnnnnnnnnnnnnnnnnnnnnnnnnnnnnnnnnnnnnnnnnnnnnnnnnnnnnnnnnnnnnnnnnnnnnnnnnnnnnnnnnnnnnnnnnnnnnnnnnnnnnnnnnnnnnnnnnnnnnnnnnnnnnnnnnnnnnnnnnnnnnnnnnnnnnnnnnnnnnnnnnnnnnnnnnnnnnnnnnnnnnnnnnnnnnnnnnnnnnnnnnnnnnnnnnnnnnnnnnnnnnnnnnnnnnnnnnnnnnnnnnnnnnnnnnnnnnnnnnnnnnnnnnnnnnnnnnnnnnnnnnnnnnnnnnnnnnnnnnnnnnnnnnnnnnnnnnnnnnnnnnnnnnnnnnnnnnnnnnnnnnnnnnnnnnnnnnnnnnnnnnnnnnnnnnnnnnnnnnnnnnnnnnnnnnnnnnnnnnnnnnnnnnnnnnnnnnnnnnnnnnnnnnnnnnnnnnnnnnnnnnnnnnnnnnnnnnnnnnnnnnnnnnnnnnnnnnnnnnnnnnnnnnnnnnnnnnnnnnnnnnnnnnnnnnnnnnnnnnnnnnnnnnnnnnnnnnnnnnnnnnnnnnnnnnnnnnnnnnnnnnnnnnnnnnnnnnnnnnnnnnnnnnnnnnnnnnnnnnnnnnnnnnnnnnnnnnnnnnnnnnnnnnnnnnnnnnnnnnnnnnnnnnnnnnnnnnnnnnnnnnnnnnnnnnnnnnnnnnnnnnnnnnnnnnnnnnnnnnnnnnnnnnnnnnnnnnnnnnnnnnnnnnnnnnnnnnnnnnnnnnnnnnnnnnnnnnnnnnnnnnnnnnnnnnnnnnnnnnnnnnnnnnnnnnnnnnnnnnnnnnnnnnnnnnnnnnnnnnnnnnnnnnnnnnnnnnnnnnnnnnnnnnnnnnnnnnnnnnnnnnnnnnnnnnnnnnnnnnnnnnnnnnnnnnnnnnnnnnnnnnnnnnnnnnnnnnnnnnnnnnnnnnnnnnnnnnnnnnnnnnnnnnnnnnnnnnnnnnnnnnnnnnnnnnnnnnnnnnnnnnnnnnnnnnnnnnnnnnnnnnnnnnnnnnnnnnnnnnnnnnnnnnnnnnnnnnnnnnnnnnnnnnnnnnnnnnnnnnnnnnnnnnnnnnnnnnnnnnnnnnnnnnnnnnnnnnnnnnnnnnnnnnnnnnnnnnnnnnnnnnnnnnnnnnnnnnnnnnnnnnnnnnnnnnnnnnnnnnnnnnnnnnnnnnnnnnnnnnnnnnnnnnnnnnnnnnnnnnnnnnnnnnnnnnnnnnnnnnnnnnnnnnnnnnnnnnnnnnnnnnnnnnnnnnnnnnnnnnnnnnnnnnnnnnnnnnnnnnnnnnnnnnnnnnnnnnnnnnnnnnnnnnnnnnnnnnnnnnnnnnnnnnnnnnnnnnnnnnnnnnnnnnnnnnnnnnnnnnnnnnnnnnnnnnnnnnnnnnnnnnnnnnnnnnnnnnnnnnnnnnnnnnnnnnnnnnnnnnnnnnnnnnnnnnnnnnnnnnnnnnnnnnnnnnnnnnnnnnnnnnnnnnnnnnnnnnnnnnnnnnnnnnnnnnnnnnnnnnnnnnnnnnnnnnnnnnnnnnnnnnnnnnnnnnnnnnnnnnnnnnnnnnnnnnnnnnnnnnnnnnnnnnnnnnnnnnnnnnnnnnnnnnnnnnnnnnnnnnnnnnnnnnnnnnnnnnnnnnnnnnnnnnnnnnnnnnnnnnnnnnnnnnnnnnnnnnnnnnnnnnnnnnnnnnnnnnnnnnnnnnnnnnnnnnnnnnnnnnnnnnnnnnnnnnnnnnnnnnnnnnnnnnnnnnnnnnnnnnnnnnnnnnnnnnnnnnnnnnnnnnnnnnnnnnnnnnnnnnnnnnnnnnnnnnnnnnnnnnnnnnnnnnnnnnnnnnnnnnnnnnnnnnnnnnnnnnnnnnnnnnnnnnnnnnnnnnnnnnnnnnnnnnnnnnnnnnnnnnnnnnnnnnnnnnnnnnnnnnnnnnnnnnnnnnnnnnnnnnnnnnnnnnnnnnnnnnnnnnnnnnnnnnnnnnnnnnnnnnnnnnnnnnnnnnnnnnnnnnnnnnnnnnnnnnnnnnnnnnnnnnnnnnnnnnnnnnnnnnnnnnnnnnnnnnnnnnnnnnnnnnnnnnnnnnnnnnnnnnnnnnnnnnnnnnnnnnnnnnnnnnnnnnnnnnnnnnnnnnnnnnnnnnnnnnnnnnnnnnnnnnnnnnnnnnnnnnnnnnnnnnnnnnnnnnnnnnnnnnnnnnnnnnnnnnnnnnnnnnnnnnnnnnnnnnnnnnnnnnnnnnnnnnnnnnnnnnnnnnnnnnnnnnnnnnnnnnnnnnnnnnnnnnnnnnnnnnnnnnnnnnnnnnnnnnnnnnnnnnnnnnnnnnnnnnnnnnnnnnnnnnnnnnnnnnnnnnnnnnnnnnnnnnnnnnnnnnnnnnnnnnnnnnnnnnnnnnnnnnnnnnnnnnnnnnnnnnnnnnnnnnnnnnnnnnnnnnnnnnnnnnnnnnnnnnnnnnnnnnnnnnnnnnnnnnnnnnnnnnnnnnnnnnnnnnnnnnnnnnnnnnnnnnnnnnnnnnnnnnnnnnnnnnnnnnnnnnnnnnnnnnnnnnnnnnnnnnnnnnnnnnnnnnnnnnnnnnnnnnnnnnnnnnnnnnnnnnnnnnnnnnnnnnnnnnnnnnnnnnnnnnnnnnnnnnnnnnnnnnnnnnnnnnnnnnnnnnnnnnnnnnnnnnnnnnnnnnnnnnnnnnnnnnnnnnnnnnnnnnnnnnnnnnnnnnnnnnnnnnnnnnnnnnnnnnnnnnnnnnnnnnnnnnnnnnnnnnnnnnnnnnnnnnnnnnnnnnnnnnnnnnnnnnnnnnnnnnnnnnnnnnnnnnnnnnnnnnnnnnnnnnnnnnnnnnnnnnnnnnnnnnnnnnnnnnnnnnnnnnnnnnnnnnnnnnnnnnnnnnnnnnnnnnnnnnnnnnnnnnnnnnnnnnnnnnnnnnnnnnnnnnnnnnnnnnnnnnnnnnnnnnnnnnnnnnnnnnnnnnnnnnnnnnnnnnnnnnnnnnnnnnnnnnnnnnnnnnnnnnnnnnnnnnnnnnnnnnnnnnnnnnnnnnnnnnnnnnnnnnnnnnnnnnnnnnnnnnnnnnnnnnnnnnnnnnnnnnnnnnnnnnnnnnnnnnnnnnnnnnnnnnnnnnnnnnnnnnnnnnnnnnnnnnnnnnnnnnnnnnnnnnnnnnnnnnnnnnnnnnnnnnnnnnnnnnnnnnnnnnnnnnnnnnnnnnnnnnnnnnnnnnnnnnnnnnnnnnnnnnnnnnnnnnnnnnnnnnnnnnnnnnnnnnnnnnnnnnnnnnnnnnnnnnnnnnnnnnnnnnnnnnnnnnnnnnnnnnnnnnnnnnnnnnnnnnnnnnnnnnnnnnnnnnnnnnnnnnnnnnnnnnnnnnnnnnnnnnnnnnnnnnnnnnnnnnnnnnnnnnnnnnnnnnnnnnnnnnnnnnnnnnnnnnnnnnnnnnnnnnnnnnnnnnnnnnnnnnnnnnnnnnnnnnnnnnnnnnnnnnnnnnnnnnnnnnnnnnnnnnnnnnnnnnnnnnnnnnnnnnnnnnnnnnnnnnnnnnnnnnnnnnnnnnnnnnnnnnnnnnnnnnnnnnnnnnnnnnnnnnnnnnnnnnnnnnnnnnnnnnnnnnnnnnnnnnnnnnnnnnnnnnnnnnnnnnnnnnnnnnnnnnnnnnnnnnnnnnnnnnnnnnnnnnnnnnnnnnnnnnnnnnnnnnnnnnnnnnnnnnnnnnnnnnnnnnnnnnnnnnnnnnnnnnnnnnnnnnnnnnnnnnnnnnnnnnnnnnnnnnnnnnnnnnnnnnnnnnnnnnnnnnnnnnnnnnnnnnnnnnnnnnnnnnnnnnnnnnnnnnnnnnnnnnnnnnnnnnnnnnnnnnnnnnnnnnnnnnnnnnnnnnnnnnnnnnnnnnnnnnnnnnnnnnnnnnnnnnnnnnnnnnnnnnnnnnnnnnnnnnnnnnnnnnnnnnnnnnnnnnnnnnnnnnnnnnnnnnnnnnnnnnnnnnnnnnnnnnnnnnnnnnnnnnnnnnnnnnnnnnnnnnnnnnnnnnnnnnnnnnnnnnnnnnnnnnnnnnnnnnnnnnnnnnnnnnnnnnnnnnnnnnnnnnnnnnnnnnnnnnnnnnnnnnnnnnnnnnnnnnnnnnnnnnnnnnnnnnnnnnnnnnnnnnnnnnnnnnnnnnnnnnnnnnnnnnnnnnnnnnnnnnnnnnnnnnnnnnnnnnnnnnnnnnnnnnnnnnnnnnnnnnnnnnnnnnnnnnnnnnnnnnnnnnnnnnnnnnnnnnnnnnnnnnnnnnnnnnnnnnnnnnnnnnnnnnnnnnnnnnnnnnnnnnnnnnnnnnnnnnnnnnnnnnnnnnnnnnnnnnnnnnnnnnnnnnnnnnnnnnnnnnnnnnnnnnnnnnnnnnnnnnnnnnnnnnnnnnnnnnnnnnnnnnnnnnnnnnnnnnnnnnnnnnnnnnnnnnnnnnnnnnnnnnnnnnnnnnnnnnnnnnnnnnnnnnnnnnnnnnnnnnnnnnnnnnnnnnnnnnnnnnnnnnnnnnnnnnnnnnnnnnnnnnnnnnnnnnnnnnnnnnnnnnnnnnnnnnnnnnnnnnnnnnnnnnnnnnnnnnnnnnnnnnnnnnnnnnnnnnnnnnnnnnnnnnnnnnnnnnnnnnnnnnnnnnnnnnnnnnnnnnnnnnnnnnnnnnnnnnnnnnnnnnnnnnnnnnnnnnnnnnnnnnnnnnnnnnnnnnnnnnnnnnnnnnnnnnnnnnnnnnnnnnnnnnnnnnnnnnnnnnnnnnnnnnnnnnnnnnnnnnnnnnnnnnnnnnnnnnnnnnnnnnnnnnnnnnnnnnnnnnnnnnnnnnnnnnnnnnnnnnnnnnnnnnnnnnnnnnnnnnnnnnnnnnnnnnnnnnnnnnnnnnnnnnnnnnnnnnnnnnnnnnnnnnnnnnnnnnnnnnnnnnnnnnnnnnnnnnnnnnnnnnnnnnnnnnnnnnnnnnnnnnnnnnnnnnnnnnnnnnnnnnnnnnnnnnnnnnnnnnnnnnnnnnnnnnnnnnnnnnnnnnnnnnnnnnnnnnnnnnnnnnnnnnnnnnnnnnnnnnnnnnnnnnnnnnnnnnnnnnnnnnnnnnnnnnnnnnnnnnnnnnnnnnnnnnnnnnnnnnnnnnnnnnnnnnnnnnnnnnnnnnnnnnnnnnnnnnnnnnnnnnnnnnnnnnnnnnnnnnnnnnnnnnnnnnnnnnnnnnnnnnnnnnnnnnnnnnnnnnnnnnnnnnnnnnnnnnnnnnnnnnnnnnnnnnnnnnnnnnnnnnnnnnnnnnnnnnnnnnnnnnnnnnnnnnnnnnnnnnnnnnnnnnnnnnnnnnnnnnnnnnnnnnnnnnnnnnnnnnnnnnnnnnnnnnnnnnnnnnnnnnnnnnnnnnnnnnnnnnnnnnnnnnnnnnnnnnnnnnnnnnnnnnnnnnnnnnnnnnnnnnnnnnnnnnnnnnnnnnnnnnnnnnnnnnnnnnnnnnnnnnnnnnnnnnnnnnnnnnnnnnnnnnnnnnnnnnnnnnnnnnnnnnnnnnnnnnnnnnnnnnnnnnnnnnnnnnnnnnnnnnnnnnnnnnnnnnnnnnnnnnnnnnnnnnnnnnnnnnnnnnnnnnnnnnnnnnnnnnnnnnnnnnnnnnnnnnnnnnnnnnnnnnnnnnnnnnnnnnnnnnnnnnnnnnnnnnnnnnnnnnnnnnnnnnnnnnnnnnnnnnnnnnnnnnnnnnnnnnnnnnnnnnnnnnnnnnnnnnnnnnnnnnnnnnnnnnnnnnnnnnnnnnnnnnnnnnnnnnnnnnnnnnnnnnnnnnnnnnnnnnnnnnnnnnnnnnnnnnnnnnnnnnnnnnnnnnnnnnnnnnnnnnnnnnnnnnnnnnnnnnnnnnnnnnnnnnnnnnnnnnnnnnnnnnnnnnnnnnnnnnnnnnnnnnnnnnnnnnnnnnnnnnnnnnnnnnnnnnnnnnnnnnnnnnnnnnnnnnnnnnnnnnnnnnnnnnnnnnnnnnnnnnnnnnnnnnnnnnnnnnnnnnnnnnnnnnnnnnnnnnnnnnnnnnnnnnnnnnnnnnnnnnnnnnnnnnnnnnnnnnnnnnnnnnnnnnnnnnnnnnnnnnnnnnnnnnnnnnnnnnnnnnnnnnnnnnnnnnnnnnnnnnnnnnnnnnnnnnnnnnnnnnnnnnnnnnnnnnnnnnnnnnnnnnnnnnnnnnnnnnnnnnnnnnnnnnnnnnnnnnnnnnnnnnnnnnnnnnnnnnnnnnnnnnnnnnnnnnnnnnnnnnnnnnnnnnnnnnnnnnnnnnnnnnnnnnnnnnnnnnnnnnnnnnnnnnnnnnnnnnnnnnnnnnnnnnnnnnnnnnnnnnnnnnnnnnnnnnnnnnnnnnnnnnnnnnnnnnnnnnnnnnnnnnnnnnnnnnnnnnnnnnnnnnnnnnnnnnnnnnnnnnnnnnnnnnnnnnnnnnnnnnnnnnnnnnnnnnnnnnnnnnnnnnnnnnnnnnnnnnnnnnnnnnnnnnnnnnnnnnnnnnnnnnnnnnnnnnnnnnnnnnnnnnnnnnnnnnnnnnnnnnnnnnnnnnnnnnnnnnnnnnnnnnnnnnnnnnnnnnnnnnnnnnnnnnnnnnnnnnnnnnnnnnnnnnnnnnnnnnnnnnnnnnnnnnnnnnnnnnnnnnnnnnnnnnnnnnnnnnnnnnnnnnnnnnnnnnnnnnnnnnnnnnnnnnnnnnnnnnnnnnnnnnnnnnnnnnnnnnnnnnnnnnnnnnnnnnnnnnnnnnnnnnnnnnnnnnnnnnnnnnnnnnnnnnnnnnnnnnnnnnnnnnnnnnnnnnnnnnnnnnnnnnnnnnnnnnnnnnnnnnnnnnnnnnnnnnnnnnnnnnnnnnnnnnnnnnnnnnnnnnnnnnnnnnnnnnnnnnnnnnnnnnnnnnnnnnnnnnnnnnnnnnnnnnnnnnnnnnnnnnnnnnnnnnnnnnnnnnnnnnnnnnnnnnnnnnnnnnnnnnnnnnnnnnnnnnnnnnnnnnnnnnnnnnnnnnnnnnnnnnnnnnnnnnnnnnnnnnnnnnnnnnnnnnnnnnnnnnnnnnnnnnnnnnnnnnnnnnnnnnnnnnnnnnnnnnnnnnnnnnnnnnnnnnnnnnnnnnnnnnnnnnnnnnnnnnnnnnnnnnnnnnnnnnnnnnnnnnnnnnnnnnnnnnnnnnnnnnnnnnnnnnnnnnnnnnnnnnnnnnnnnnnnnnnnnnnnnnnnnnnnnnnnnnnnnnnnnnnnnnnnnnnnnnnnnnnnnnnnnnnnnnnnnnnnnnnnnnnnnnnnnnnnnnnnnnnnnnnnnnnnnnnnnnnnnnnnnnnnnnnnnnnnnnnnnnnnnnnnnnnnnnnnnnnnnnnnnnnnnnnnnnnnnnnnnnnnnnnnnnnnnnnnnnnnnnnnnnnnnnnnnnnnnnnnnnnnnnnnnnnnnnnnnnnnnnnnnnnnnnnnnnnnnnnnnnnnnnnnnnnnnnnnnnnnnnnnnnnnnnnnnnnnnnnnnnnnnnnnnnnnnnnnnnnnnnnnnnnnnnnnnnnnnnnnnnnnnnnnnnnnnnnnnnnnnnnnnnnnnnnnnnnnnnnnnnnnnnnnnnnnnnnnnnnnnnnnnnnnnnnnnnnnnnnnnnnnnnnnnnnnnnnnnnnnnnnnnnnnnnnnnnnnnnnnnnnnnnnnnnnnnnnnnnnnnnnnnnnnnnnnnnnnnnnnnnnnnnnnnnnnnnnnnnnnnnnnnnnnnnnnnnnnnnnnnnnnnnnnnnnnnnnnnnnnnnnnnnnnnnnnnnnnnnnnnnnnnnnnnnnnnnnnnnnnnnnnnnnnnnnnnnnnnnnnnnnnnnnnnnnnnnnnnnnnnnnnnnnnnnnnnnnnnnnnnnnnnnnnnnnnnnnnnnnnnnnnnnnnnnnnnnnnnnnnnnnnnnnnnnnnnnnnnnnnnnnnnnnnnnnnnnnnnnnnnnnnnnnnnnnnnnnnnnnnnnnnnnnnnnnnnnnnnnnnnnnnnnnnnnnnnnnnnnnnnnnnnnnnnnnnnnnnnnnnnnnnnnnnnnnnnnnnnnnnnnnnnnnnnnnnnnnnnnnnnnnnnnnnnnnnnnnnnnnnnnnnnnnnnnnnnnnnnnnnnnnnnnnnnnnnnnnnnnnnnnnnnnnnnnnnnnnnnnnnnnnnnnnnnnnnnnnnnnnnnnnnnnnnnnnnnnnnnnnnnnnnnnnnnnnnnnnnnnnnnnnnnnnnnnnnnnnnnnnnnnnnnnnnnnnnnnnnnnnnnnnnnnnnnnnnnnnnnnnnnnnnnnnnnnnnnnnnnnnnnnnnnnnnnnnnnnnnnnnnnnnnnnnnnnnnnnnnnnnnnnnnnnnnnnnnnnnnnnnnnnnnnnnnnnnnnnnnnnnnnnnnnnnnnnnnnnnnnnnnnnnnnnnnnnnnnnnnnnnnnnnnnnnnnnnnnnnnnnnnnnnnnnnnnnnnnnnnnnnnnnnnnnnnnnnnnnnnnnnnnnnnnnnnnnnnnnnnnnnnnnnnnnnnnnnnnnnnnnnnnnnnnnnnnnnnnnnnnnnnnnnnnnnnnnnnnnnnnnnnnnnnnnnnnnnnnnnnnnnnnnnnnnnnnnnnnnnnnnnnnnnnnnnnnnnnnnnnnnnnnnnnnnnnnnnnnnnnnnnnnnnnnnnnnnnnnnnnnnnnnnnnnnnnnnnnnnnnnnnnnnnnnnnnnnnnnnnnnnnnnnnnnnnnnnnnnnnnnnnnnnnnnnnnnnnnnnnnnnnnnnnnnnnnnnnnnnnnnnnnnnnnnnnnnnnnnnnnnnnnnnnnnnnnnnnnnnnnnnnnnnnnnnnnnnnnnnnnnnnnnnnnnnnnnnnnnnnnnnnnnnnnnnnnnnnnnnnnnnnnnnnnnnnnnnnnnnnnnnnnnnnnnnnnnnnnnnnnnnnnnnnnnnnnnnnnnnnnnnnnnnnnnnnnnnnnnnnnnnnnnnnnnnnnnnnnnnnnnnnnnnnnnnnnnnnnnnnnnnnnnnnnnnnnnnnnnnnnnnnnnnnnnnnnnnnnnnnnnnnnnnnnnnnnnnnnnnnnnnnnnnnnnnnnnnnnnnnnnnnnnnnnnnnnnnnnnnnnnnnnnnnnnnnnnnnnnnnnnnnnnnnnnnnnnnnnnnnnnnnnnnnnnnnnnnnnnnnnnnnnnnnnnnnnnnnnnnnnnnnnnnnnnnnnnnnnnnnnnnnnnnnnnnnnnnnnnnnnnnnnnnnnnnnnnnnnnnnnnnnnnnnnnnnnnnnnnnnnnnnnnnnnnnnnnnnnnnnnnnnnnnnnnnnnnnnnnnnnnnnnnnnnnnnnnnnnnnnnnnnnnnnnnnnnnnnnnnnnnnnnnnnnnnnnnnnnnnnnnnnnnnnnnnnnnnnnnnnnnnnnnnnnnnnnnnnnnnnnnnnnnnnnnnnnnnnnnnnnnnnnnnnnnnnnnnnnnnnnnnnnnnnnnnnnnnnnnnnnnnnnnnnnnnnnnnnnnnnnnnnnnnnnnnnnnnnnnnnnnnnnnnnnnnnnnnnnnnnnnnnnnnnnnnnnnnnnnnnnnnnnnnnnnnnnnnnnnnnnnnnnnnnnnnnnnnnnnnnnnnnnnnnnnnnnnnnnnnnnnnnnnnnnnnnnnnnnnnnnnnnnnnnnnnnnnnnnnnnnnnnnnnnnnnnnnnnnnnnnnnnnnnnnnnnnnnnnnnnnnnnnnnnnnnnnnnnnnnnnnnnnnnnnnnnnnnnnnnnnnnnnnnnnnnnnnnnnnnnnnnnnnnnnnnnnnnnnnnnnnnnnnnnnnnnnnnnnnnnnnnnnnnnnnnnnnnnnnnnnnnnnnnnnnnnnnnnnnnnnnnnnnnnnnnnnnnnnnnnnnnnnnnnnnnnnnnnnnnnnnnnnnnnnnnnnnnnnnnnnnnnnnnnnnnnnnnnnnnnnnnnnnnnnnnnnnnnnnnnnnnnnnnnnnnnnnnnnnnnnnnnnnnnnnnnnnnnnnnnnnnnnnnnnnnnnnnnnnnnnnnnnnnnnnnnnnnnnnnnnnnnnnnnnnnnnnnnnnnnnnnnnnnnnnnnnnnnnnnnnnnnnnnnnnnnnnnnnnnnnnnnnnnnnnnnnnnnnnnnnnnnnnnnnnnnnnnnnnnnnnnnnnnnnnnnnnnnnnnnnnnnnnnnnnnnnnnnnnnnnnnnnnnnnnnnnnnnnnnnnnnnnnnnnnnnnnnnnnnnnnnnnnnnnnnnnnnnnnnnnnnnnnnnnnnnnnnnnnnnnnnnnnnnnnnnnnnnnnnnnnnnnnnnnnnnnnnnnnnnnnnnnnnnnnnnnnnnnnnnnnnnnnnnnnnnnnnnnnnnnnnnnnnnnnnnnnnnnnnnnnnnnnnnnnnnnnnnnnnnnnnnnnnnnnnnnnnnnnnnnnnnnnnnnnnnnnnnnnnnnnnnnnnnnnnnnnnnnnnnnnnnnnnnnnnnnnnnnnnnnnnnnnnnnnnnnnnnnnnnnnnnnnnnnnnnnnnnnnnnnnnnnnnnnnnnnnnnnnnnnnnnnnnnnnnnnnnnnnnnnnnnnnnnnnnnnnnnnnnnnnnnnnnnnnnnnnnnnnnnnnnnnnnnnnnnnnnnnnnnnnnnnnnnnnnnnnnnnnnnnnnnnnnnnnnnnnnnnnnnnnnnnnnnnnnnnnnnnnnnnnnnnnnnnnnnnnnnnnnnnnnnnnnnnnnnnnnnnnnnnnnnnnnnnnnnnnnnnnnnnnnnnnnnnnnnnnnnnnnnnnnnnnnnnnnnnnnnnnnnnnnnnnnnnnnnnnnnnnnnnnnnnnnnnnnnnnnnnnnnnnnnnnnnnnnnnnnnnnnnnnnnnnnnnnnnnnnnnnnnnnnnnnnnnnnnnnnnnnnnnnnnnnnnnnnnnnnnnnnnnnnnnnnnnnnnnnnnnnnnnnnnnnnnnnnnnnnnnnnnnnnnnnnnnnnnnnnnnnnnnnnnnnnnnnnnnnnnnnnnnnnnnnnnnnnnnnnnnnnnnnnnnnnnnnnnnnnnnnnnnnnnnnnnnnnnnnnnnnnnnnnnnnnnnnnnnnnnnnnnnnnnnnnnnnnnnnnnnnnnnnnnnnnnnnnnnnnnnnnnnnnnnnnnnnnnnnnnnnnnnnnnnnnnnnnnnnnnnnnnnnnnnnnnnnnnnnnnnnnnnnnnnnnnnnnnnnnnnnnnnnnnnnnnnnnnnnnnnnnnnnnnnnnnnnnnnnnnnnnnnnnnnnnnnnnnnnnnnnnnnnnnnnnnnnnnnnnnnnnnnnnnnnnnnnnnnnnnnnnnnnnnnnnnnnnnnnnnnnnnnnnnnnnnnnnnnnnnnnnnnnnnnnnnnnnnnnnnnnnnnnnnnnnnnnnnnnnnnnnnnnnnnnnnnnnnnnnnnnnnnnnnnnnnnnnnnnnnnnnnnnnnnnnnnnnnnnnnnnnnnnnnnnnnnnnnnnnnnnnnnnnnnnnnnnnnnnnnnnnnnnnnnnnnnnnnnnnnnnnnnnnnnnnnnnnnnnnnnnnnnnnnnnnnnnnnnnnnnnnnnnnnnnnnnnnnnnnnnnnnnnnnnnnnnnnnnnnnnnnnnnnnnnnnnnnnnnnnnnnnnnnnnnnnnnnnnnnnnnnnnnnnnnnnnnnnnnnnnnnnnnnnnnnnnnnnnnnnnnnnnnnnnnnnnnnnnnnnnnnnnnnnnnnnnnnnnnnnnnnnnnnnnnnnnnnnnnnnnnnnnnnnnnnnnnnnnnnnnnnnnnnnnnnnnnnnnnnnnnnnnnnnnnnnnnnnnnnnnnnnnnnnnnnnnnnnnnnnnnnnnnnnnnnnnnnnnnnnnnnnnnnnnnnnnnnnnnnnnnnnnnnnnnnnnnnnnnnnnnnnnnnnnnnnnnnnnnnnnnnnnnnnnnnnnnnnnnnnnnnnnnnnnnnnnnnnnnnnnnnnnnnnnnnnnnnnnnnnnnnnnnnnnnnnnnnnnnnnnnnnnnnnnnnnnnnnnnnnnnnnnnnnnnnnnnnnnnnnnnnnnnnnnnnnnnnnnnnnnnnnnnnnnnnnnnnnnnnnnnnnnnnnnnnnnnnnnnnnnnnnnnnnnnnnnnnnnnnnnnnnnnnnnnnnnnnnnnnnnnnnnnnnnnnnnnnnnnnnnnnnnnnnnnnnnnnnnnnnnnnnnnnnnnnnnnnnnnnnnnnnnnnnnnnnnnnnnnnnnnnnnnnnnnnnnnnnnnnnnnnnnnnnnnnnnnnnnnnnnnnnnnnnnnnnnnnnnnnnnnnnnnnnnnnnnnnnnnnnnnnnnnnnnnnnnnnnnnnnnnnnnnnnnnnnnnnnnnnnnnnnnnnnnnnnnnnnnnnnnnnnnnnnnnnnnnnnnnnnnnnnnnnnnnnnnnnnnnnnnnnnnnnnnnnnnnnnnnnnnnnnnnnnnnnnnnnnnnnnnnnnnnnnnnnnnnnnnnnnnnnnnnnnnnnnnnnnnnnnnnnnnnnnnnnnnnnnnnnnnnnnnnnnnnnnnnnnnnnnnnnnnnnnnnnnnnnnnnnnnnnnnnnnnnnnnnnnnnnnnnnnnnnnnnnnnnnnnnnnnnnnnnnnnnnnnnnnnnnnnnnnnnnnnnnnnnnnnnnnnnnnnnnnnnnnnnnnnnnnnnnnnnnnnnnnnnnnnnnnnnnnnnnnnnnnnnnnnnnnnnnnnnnnnnnnnnnnnnnnnnnnnnnnnnnnnnnnnnnnnnnnnnnnnnnnnnnnnnnnnnnnnnnnnnnnnnnnnnnnnnnnnnnnnnnnnnnnnnnnnnnnnnnnnnnnnnnnnnnnnnnnnnnnnnnnnnnnnnnnnnnnnnnnnnnnnnnnnnnnnnnnnnnnnnnnnnnnnnnnnnnnnnnnnnnnnnnnnnnnnnnnnnnnnnnnnnnnnnnnnnnnnnnnnnnnnnnnnnnnnnnnnnnnnnnnnnnnnnnnnnnnnnnnnnnnnnnnnnnnnnnnnnnnnnnnnnnnnnnnnnnnnnnnnnnnnnnnnnnnnnnnnnnnnnnnnnnnnnnnnnnnnnnnnnnnnnnnnnnnnnnnnnnnnnnnnnnnnnnnnnnnnnnnnnnnnnnnnnnnnnnnnnnnnnnnnnnnnnnnnnnnnnnnnnnnnnnnnnnnnnnnnnnnnnnnnnnnnnnnnnnnnnnnnnnnnnnnnnnnnnnnnnnnnnnnnnnnnnnnnnnnnnnnnnnnnnnnnnnnnnnnnnnnnnnnnnnnnnnnnnnnnnnnnnnnnnnnnnnnnnnnnnnnnnnnnnnnnnnnnnnnnnnnnnnnnnnnnnnnnnnnnnnnnnnnnnnnnnnnnnnnnnnnnnnnnnnnnnnnnnnnnnnnnnnnnnnnnnnnnnnnnnnnnnnnnnnnnnnnnnnnnnnnnnnnnnnnnnnnnnnnnnnnnnnnnnnnnnnnnnnnnnnnnnnnnnnnnnnnnnnnnnnnnnnnnnnnnnnnnnnnnnnnnnnnnnnnnnnnnnnnnnnnnnnnnnnnnnnnnnnnnnnnnnnnnnnnnnnnnnnnnnnnnnnnnnnnnnnnnnnnnnnnnnnnnnnnnnnnnnnnnnnnnnnnnnnnnnnnnnnnnnnnnnnnnnnnnnnnnnnnnnnnnnnnnnnnnnnnnnnnnnnnnnnnnnnnnnnnnnnnnnnnnnnnnnnnnnnnnnnnnnnnnnnnnnnnnnnnnnnnnnnnnnnnnnnnnnnnnnnnnnnnnnnnnnnnnnnnnnnnnnnnnnnnnnnnnnnnnnnnnnnnnnnnnnnnnnnnnnnnnnnnnnnnnnnnnnnnnnnnnnnnnnnnnnnnnnnnnnnnnnnnnnnnnnnnnnnnnnnnnnnnnnnnnnnnnnnnnnnnnnnnnnnnnnnnnnnnnnnnnnnnnnnnnnnnnnnnnnnnnnnnnnnnnnnnnnnnnnnnnnnnnnnnnnnnnnnnnnnnnnnnnnnnnnnnnnnnnnnnnnnnnnnnnnnnnnnnnnnnnnnnnnnnnnnnnnnnnnnnnnnnnnnnnnnnnnnnnnnnnnnnnnnnnnnnnnnnnnnnnnnnnnnnnnnnnnnnnnnnnnnnnnnnnnnnnnnnnnnnnnnnnnnnnnnnnnnnnnnnnnnnnnnnnnnnnnnnnnnnnnnnnnnnnnnnnnnnnnnnnnnnnnnnnnnnnnnnnnnnnnnnnnnnnnnnnnnnnnnnnnnnnnnnnnnnnnnnnnnnnnnnnnnnnnnnnnnnnnnnnnnnnnnnnnnnnnnnnnnnnnnnnnnnnnnnnnnnnnnnnnnnnnnnnnnnnnnnnnnnnnnnnnnnnnnnnnnnnnnnnnnnnnnnnnnnnnnnnnnnnnnnnnnnnnnnnnnnnnnnnnnnnnnnnnnnnnnnnnnnnnnnnnnnnnnnnnnnnnnnnnnnnnnnnnnnnnnnnnnnnnnnnnnnnnnnnnnnnnnnnnnnnnnnnnnnnnnnnnnnnnnnnnnnnnnnnnnnnnnnnnnnnnnnnnnnnnnnnnnnnnnnnnnnnnnnnnnnnnnnnnnnnnnnnnnnnnnnnnnnnnnnnnnnnnnnnnnnnnnnnnnnnnnnnnnnnnnnnnnnnnnnnnnnnnnnnnnnnnnnnnnnnnnnnnnnnnnnnnnnnnnnnnnnnnnnnnnnnnnnnnnnnnnnnnnnnnnnnnnnnnnnnnnnnnnnnnnnnnnnnnnnnnnnnnnnnnnnnnnnnnnnnnnnnnnnnnnnnnnnnnnnnnnnnnnnnnnnnnnnnnnnnnnnnnnnnnnnnnnnnnnnnnnnnnnnnnnnnnnnnnnnnnnnnnnnnnnnnnnnnnnnnnnnnnnnnnnnnnnnnnnnnnnnnnnnnnnnnnnnnnnnnnnnnnnnnnnnnnnnnnnnnnnnnnnnnnnnnnnnnnnnnnnnnnnnnnnnnnnnnnnnnnnnnnnnnnnnnnnnnnnnnnnnnnnnnnnnnnnnnnnnnnnnnnnnnnnnnnnnnnnnnnnnnnnnnnnnnnnnnnnnnnnnnnnnnnnnnnnnnnnnnnnnnnnnnnnnnnnnnnnnnnnnnnnnnnnnnnnnnnnnnnnnnnnnnnnnnnnnnnnnnnnnnnnnnnnnnnnnnnnnnnnnnnnnnnnnnnnnnnnnnnnnnnnnnnnnnnnnnnnnnnnnnnnnnnnnnnnnnnnnnnnnnnnnnnnnnnnnnnnnnnnnnnnnnnnnnnnnnnnnnnnnnnnnnnnnnnnnnnnnnnnnnnnnnnnnnnnnnnnnnnnnnnnnnnnnnnnnnnnnnnnnnnnnnnnnnnnnnnnnnnnnnnnnnnnnnnnnnnnnnnnnnnnnnnnnnnnnnnnnnnnnnnnnnnnnnnnnnnnnnnnnnnnnnnnnnnnnnnnnnnnnnnnnnnnnnnnnnnnnnnnnnnnnnnnnnnnnnnnnnnnnnnnnnnnnnnnnnnnnnnnnnnnnnnnnnnnnnnnnnnnnnnnnnnnnnnnnnnnnnnnnnnnnnnnnnnnnnnnnnnnnnnnnnnnnnnnnnnnnnnnnnnnnnnnnnnnnnnnnnnnnnnnnnnnnnnnnnnnnnnnnnnnnnnnnnnnnnnnnnnnnnnnnnnnnnnnnnnnnnnnnnnnnnnnnnnnnnnnnnnnnnnnnnnnnnnnnnnnnnnnnnnnnnnnnnnnnnnnnnnnnnnnnnnnnnnnnnnnnnnnnnnnnnnnnnnnnnnnnnnnnnnnnnnnnnnnnnnnnnnnnnnnnnnnnnnnnnnnnnnnnnnnnnnnnnnnnnnnnnnnnnnnnnnnnnnnnnnnnnnnnnnnnnnnnnnnnnnnnnnnnnnnnnnnnnnnnnnnnnnnnnnnnnnnnnnnnnnnnnnnnnnnnnnnnnnnnnnnnnnnnnnnnnnnnnnnnnnnnnnnnnnnnnnnnnnnnnnnnnnnnnnnnnnnnnnnnnnnnnnnnnnnnnnnnnnnnnnnnnnnnnnnnnnnnnnnnnnnnnnnnnnnnnnnnnnnnnnnnnnnnnnnnnnnnnnnnnnnnnnnnnnnnnnnnnnnnnnnnnnnnnnnnnnnnnnnnnnnnnnnnnnnnnnnnnnnnnnnnnnnnnnnnnnnnnnnnnnnnnnnnnnnnnnnnnnnnnnnnnnnnnnnnnnnnnnnnnnnnnnnnnnnnnnnnnnnnnnnnnnnnnnnnnnnnnnnnnnnnnnnnnnnnnnnnnnnnnnnnnnnnnnnnnnnnnnnnnnnnnnnnnnnnnnnnnnnnnnnnnnnnnnnnnnnnnnnnnnnnnnnnnnnnnnnnnnnnnnnnnnnnnnnnnnnnnnnnnnnnnnnnnnnnnnnnnnnnnnnnnnnnnnnnnnnnnnnnnnnnnnnnnnnnnnnnnnnnnnnnnnnnnnnnnnnnnnnnnnnnnnnnnnnnnnnnnnnnnnnnnnnnnnnnnnnnnnnnnnnnnnnnnnnnnnnnnnnnnnnnnnnnnnnnnnnnnnnnnnnnnnnnnnnnnnnnnnnnnnnnnnnnnnnnnnnnnnnnnnnnnnnnnnnnnnnnnnnnnnnnnnnnnnnnnnnnnnnnnnnnnnnnnnnnnnnnnnnnnnnnnnnnnnnnnnnnnnnnnnnnnnnnnnnnnnnnnnnnnnnnnnnnnnnnnnnnnnnnnnnnnnnnnnnnnnnnnnnnnnnnnnnnnnnnnnnnnnnnnnnnnnnnnnnnnnnnnnnnnnnnnnnnnnnnnnnnnnnnnnnnnnnnnnnnnnnnnnnnnnnnnnnnnnnnnnnnnnnnnnnnnnnnnnnnnnnnnnnnnnnnnnnnnnnnnnnnnnnnnnnnnnnnnnnnnnnnnnnnnnnnnnnnnnnnnnnnnnnnnnnnnnnnnnnnnnnnnnnnnnnnnnnnnnnnnnnnnnnnnnnnnnnnnnnnnnnnnnnnnnnnnnnnnnnnnnnnnnnnnnnnnnnnnnnnnnnnnnnnnnnnnnnnnnnnnnnnnnnnnnnnnnnnnnnnnnnnnnnnnnnnnnnnnnnnnnnnnnnnnnnnnnnnnnnnnnnnnnnnnnnnnnnnnnnnnnnnnnnnnnnnnnnnnnnnnnnnnnnnnnnnnnnnnnnnnnnnnnnnnnnnnnnnnnnnnnnnnnnnnnnnnnnnnnnnnnnnnnnnnnnnnnnnnnnnnnnnnnnnnnnnnnnnnnnnnnnnnnnnnnnnnnnnnnnnnnnnnnnnnnnnnnnnnnnnnnnnnnnnnnnnnnnnnnnnnnnnnnnnnnnnnnnnnnnnnnnnnnnnnnnnnnnnnnnnnnnnnnnnnnnnnnnnnnnnnnnnnnnnnnnnnnnnnnnnnnnnnnnnnnnnnnnnnnnnnnnnnnnnnnnnnnnnnnnnnnnnnnnnnnnnnnnnnnnnnnnnnnnnnnnnnnnnnnnnnnnnnnnnnnnnnnnnnnnnnnnnnnnnnnnnnnnnnnnnnnnnnnnnnnnnnnnnnnnnnnnnnnnnnnnnnnnnnnnnnnnnnnnnnnnnnnnnnnnnnnnnnnnnnnnnnnnnnnnnnnnnnnnnnnnnnnnnnnnnnnnnnnnnnnnnnnnnnnnnnnnnnnnnnnnnnnnnnnnnnnnnnnnnnnnnnnnnnnnnnnnnnnnnnnnnnnnnnnnnnnnnnnnnnnnnnnnnnnnnnnnnnnnnnnnnnnnnnnnnnnnnnnnnnnnnnnnnnnnnnnnnnnnnnnnnnnnnnnnnnnnnnnnnnnnnnnnnnnnnnnnnnnnnnnnnnnnnnnnnnnnnnnnnnnnnnnnnnnnnnnnnnnnnnnnnnnnnnnnnnnnnnnnnnnnnnnnnnnnnnnnnnnnnnnnnnnnnnnnnnnnnnnnnnnnnnnnnnnnnnnnnnnnnnnnnnnnnnnnnnnnnnnnnnnnnnnnnnnnnnnnnnnnnnnnnnnnnnnnnnnnnnnnnnnnnnnnnnnnnnnnnnnnnnnnnnnnnnnnnnnnnnnnnnnnnnnnnnnnnnnnnnnnnnnnnnnnnnnnnnnnnnnnnnnnnnnnnnnnnnnnnnnnnnnnnnnnnnnnnnnnnnnnnnnnnnnnnnnnnnnnnnnnnnnnnnnnnnnnnnnnnnnnnnnnnnnnnnnnnnnnnnnnnnnnnnnnnnnnnnnnnnnnnnnnnnnnnnnnnnnnnnnnnnnnnnnnnnnnnnnnnnnnnnnnnnnnnnnnnnnnnnnnnnnnnnnnnnnnnnnnnnnnnnnnnnnnnnnnnnnnnnnnnnnnnnnnnnnnnnnnnnnnnnnnnnnnnnnnnnnnnnnnnnnnnnnnnnnnnnnnnnnnnnnnnnnnnnnnnnnnnnnnnnnnnnnnnnnnnnnnnnnnnnnnnnnnnnnnnnnnnnnnnnnnnnnnnnnnnnnnnnnnnnnnnnnnnnnnnnnnnnnnnnnnnnnnnnnnnnnnnnnnnnnnnnnnnnnnnnnnnnnnnnnnnnnnnnnnnnnnnnnnnnnnnnnnnnnnnnnnnnnnnnnnnnnnnnnnnnnnnnnnnnnnnnnnnnnnnnnnnnnnnnnnnnnnnnnnnnnnnnnnnnnnnnnnnnnnnnnnnnnnnnnnnnnnnnnnnnnnnnnnnnnnnnnnnnnnnnnnnnnnnnnnnnnnnnnnnnnnnnnnnnnnnnnnnnnnnnnnnnnnnnnnnnnnnnnnnnnnnnnnnnnnnnnnnnnnnnnnnnnnnnnnnnnnnnnnnnnnnnnnnnnnnnnnnnnnnnnnnnnnnnnnnnnnnnnnnnnnnnnnnnnnnnnnnnnnnnnnnnnnnnnnnnnnnnnnnnnnnnnnnnnnnnnnnnnnnnnnnnnnnnnnnnnnnnnnnnnnnnnnnnnnnnnnnnnnnnnnnnnnnnnnnnnnnnnnnnnnnnnnnnnnnnnnnnnnnnnnnnnnnnnnnnnnnnnnnnnnnnnnnnnnnnnnnnnnnnnnnnnnnnnnnnnnnnnnnnnnnnnnnnnnnnnnnnnnnnnnnnnnnnnnnnnnnnnnnnnnnnnnnnnnnnnnnnnnnnnnnnnnnnnnnnnnnnnnnnnnnnnnnnnnnnnnnnnnnnnnnnnnnnnnnnnnnnnnnnnnnnnnnnnnnnnnnnnnnnnnnnnnnnnnnnnnnnnnnnnnnnnnnnnnnnnnnnnnnnnnnnnnnnnnnnnnnnnnnnnnnnnnnnnnnnnnnnnnnnnnnnnnnnnnnnnnnnnnnnnnnnnnnnnnnnnnnnnnnnnnnnnnnnnnnnnnnnnnnnnnnnnnnnnnnnnnnnnnnnnnnnnnnnnnnnnnnnnnnnnnnnnnnnnnnnnnnnnnnnnnnnnnnnnnnnnnnnnnnnnnnnnnnnnnnnnnnnnnnnnnnnnnnnnnnnnnnnnnnnnnnnnnnnnnnnnnnnnnnnnnnnnnnnnnnnnnnnnnnnnnnnnnnnnnnnnnnnnnnnnnnnnnnnnnnnnnnnnnnnnnnnnnnnnnnnnnnnnnnnnnnnnnnnnnnnnnnnnnnnnnnnnnnnnnnnnnnnnnnnnnnnnnnnnnnnnnnnnnnnnnnnnnnnnnnnnnnnnnnnnnnnnnnnnnnnnnnnnnnnnnnnnnnnnnnnnnnnnnnnnnnnnnnnnnnnnnnnnnnnnnnnnnnnnnnnnnnnnnnnnnnnnnnnnnnnnnnnnnnnnnnnnnnnnnnnnnnnnnnnnnnnnnnnnnnnnnnnnnnnnnnnnnnnnnnnnnnnnnnnnnnnnnnnnnnnnnnnnnnnnnnnnnnnnnnnnnnnnnnnnnnnnnnnnnnnnnnnnnnnnnnnnnnnnnnnnnnnnnnnnnnnnnnnnnnnnnnnnnnnnnnnnnnnnnnnnnnnnnnnnnnnnnnnnnnnnnnnnnnnnnnnnnnnnnnnnnnnnnnnnnnnnnnnnnnnnnnnnnnnnnnnnnnnnnnnnnnnnnnnnnnnnnnnnnnnnnnnnnnnnnnnnnnnnnnnnnnnnnnnnnnnnnnnnnnnnnnnnnnnnnnnnnnnnnnnnnnnnnnnnnnnnnnnnnnnnnnnnnnnnnnnnnnnnnnnnnnnnnnnnnnnnnnnnnnnnnnnnnnnnnnnnnnnnnnnnnnnnnnnnnnnnnnnnnnnnnnnnnnnnnnnnnnnnnnnnnnnnnnnnnnnnnnnnnnnnnnnnnnnnnnnnnnnnnnnnnnnnnnnnnnnnnnnnnnnnnnnnnnnnnnnnnnnnnnnnnnnnnnnnnnnnnnnnnnnnnnnnnnnnnnnnnnnnnnnnnnnnnnnnnnnnnnnnnnnnnnnnnnnnnnnnnnnnnnnnnnnnnnnnnnnnnnnnnnnnnnnnnnnnnnnnnnnnnnnnnnnnnnnnnnnnnnnnnnnnnnnnnnnnnnnnnnnnnnnnnnnnnnnnnnnnnnnnnnnnnnnnnnnnnnnnnnnnnnnnnnnnnnnnnnnnnnnnnnnnnnnnnnnnnnnnnnnnnnnnnnnnnnnnnnnnnnnnnnnnnnnnnnnnnnnnnnnnnnnnnnnnnnnnnnnnnnnnnnnnnnnnnnnnnnnnnnnnnnnnnnnnnnnnnnnnnnnnnnnnnnnnnnnnnnnnnnnnnnnnnnnnnnnnnnnnnnnnnnnnnnnnnnnnnnnnnnnnnnnnnnnnnnnnnnnnnnnnnnnnnnnnnnnnnnnnnnnnnnnnnnnnnnnnnnnnnnnnnnnnnnnnnnnnnnnnnnnnnnnnnnnnnnnnnnnnnnnnnnnnnnnnnnnnnnnnnnnnnnnnnnnnnnnnnnnnnnnnnnnnnnnnnnnnnnnnnnnnnnnnnnnnnnnnnnnnnnnnnnnnnnnnnnnnnnnnnnnnnnnnnnnnnnnnnnnnnnnnnnnnnnnnnnnnnnnnnnnnnnnnnnnnnnnnnnnnnnnnnnnnnnnnnnnnnnnnnnnnnnnnnnnnnnnnnnnnnnnnnnnnnnnnnnnnnnnnnnnnnnnnnnnnnnnnnnnnnnnnnnnnnnnnnnnnnnnnnnnnnnnnnnnnnnnnnnnnnnnnnnnnnnnnnnnnnnnnnnnnnnnnnnnnnnnnnnnnnnnnnnnnnnnnnnnnnnnnnnnnnnnnnnnnnnnnnnnnnnnnnnnnnnnnnnnnnnnnnnnnnnnnnnnnnnnnnnnnnnnnnnnnnnnnnnnnnnnnnnnnnnnnnnnnnnnnnnnnnnnnnnnnnnnnnnnnnnnnnnnnnnnnnnnnnnnnnnnnnnnnnnnnnnnnnnnnnnnnnnnnnnnnnnnnnnnnnnnnnnnnnnnnnnnnnnnnnnnnnnnnnnnnnnnnnnnnnnnnnnnnnnnnnnnnnnnnnnnnnnnnnnnnnnnnnnnnnnnnnnnnnnnnnnnnnnnnnnnnnnnnnnnnnnnnnnnnnnnnnnnnnnnnnnnnnnnnnnnnnnnnnnnnnnnnnnnnnnnnnnnnnnnnnnnnnnnnnnnnnnnnnnnnnnnnnnnnnnnnnnnnnnnnnnnnnnnnnnnnnnnnnnnnnnnnnnnnnnnnnnnnnnnnnnnnnnnnnnnnnnnnnnnnnnnnnnnnnnnnnnnnnnnnnnnnnnnnnnnnnnnnnnnnnnnnnnnnnnnnnnnnnnnnnnnnnnnnnnnnnnnnnnnnnnnnnnnnnnnnnnnnnnnnnnnnnnnnnnnnnnnnnnnnnnnnnnnnnnnnnnnnnnnnnnnnnnnnnnnnnnnnnnnnnnnnnnnnnnnnnnnnnnnnnnnnnnnnnnnnnnnnnnnnnnnnnnnnnnnnnnnnnnnnnnnnnnnnnnnnnnnnnnnnnnnnnnnnnnnnnnnnnnnnnnnnnnnnnnnnnnnnnnnnnnnnnnnnnnnnnnnnnnnnnnnnnnnnnnnnnnnnnnnnnnnnnnnnnnnnnnnnnnnnnnnnnnnnnnnnnnnnnnnnnnnnnnnnnnnnnnnnnnnnnnnnnnnnnnnnnnnnnnnnnnnnnnnnnnnnnnnnnnnnnnnnnnnnnnnnnnnnnnnnnnnnnnnnnnnnnnnnnnnnnnnnnnnnnnnnnnnnnnnnnnnnnnnnnnnnnnnnnnnnnnnnnnnnnnnnnnnnnnnnnnnnnnnnnnnnnnnnnnnnnnnnnnnnnnnnnnnnnnnnnnnnnnnnnnnnnnnnnnnnnnnnnnnnnnnnnnnnnnnnnnnnnnnnnnnnnnnnnnnnnnnnnnnnnnnnnnnnnnnnnnnnnnnnnnnnnnnnnnnnnnnnnnnnnnnnnnnnnnnnnnnnnnnnnnnnnnnnnnnnnnnnnnnnnnnnnnnnnnnnnnnnnnnnnnnnnnnnnnnnnnnnnnnnnnnnnnnnnnnnnnnnnnnnnnnnnnnnnnnnnnnnnnnnnnnnnnnnnnnnnnnnnnnnnnnnnnnnnnnnnnnnnnnnnnnnnnnnnnnnnnnnnnnnnnnnnnnnnnnnnnnnnnnnnnnnnnnnnnnnnnnnnnnnnnnnnnnnnnnnnnnnnnnnnnnnnnnnnnnnnnnnnnnnnnnnnnnnnnnnnnnnnnnnnnnnnnnnnnnnnnnnnnnnnnnnnnnnnnnnnnnnnnnnnnnnnnnnnnnnnnnnnnnnnnnnnnnnnnnnnnnnnnnnnnnnnnnnnnnnnnnnnnnnnnnnnnnnnnnnnnnnnnnnnnnnnnnnnnnnnnnnnnnnnnnnnnnnnnnnnnnnnnnnnnnnnnnnnnnnnnnnnnnnnnnnnnnnnnnnnnnnnnnnnnnnnnnnnnnnnnnnnnnnnnnnnnnnnnnnnnnnnnnnnnnnnnnnnnnnnnnnnnnnnnnnnnnnnnnnnnnnnnnnnnnnnnnnnnnnnnnnnnnnnnnnnnnnnnnnnnnnnnnnnnnnnnnnnnnnnnnnnnnnnnnnnnnnnnnnnnnnnnnnnnnnnnnnnnnnnnnnnnnnnnnnnnnnnnnnnnnnnnnnnnnnnnnnnnnnnnnnnnnnnnnnnnnnnnnnnnnnnnnnnnnnnnnnnnnnnnnnnnnnnnnnnnnnnnnnnnnnnnnnnnnnnnnnnnnnnnnnnnnnnnnnnnnnnnnnnnnnnnnnnnnnnnnnnnnnnnnnnnnnnnnnnnnnnnnnnnnnnnnnnnnnnnnnnnnnnnnnnnnnnnnnnnnnnnnnnnnnnnnnnnnnnnnnnnnnnnnnnnnnnnnnnnnnnnnnnnnnnnnnnnnnnnnnnnnnnnnnnnnnnnnnnnnnnnnnnnnnnnnnnnnnnnnnnnnnnnnnnnnnnnnnnnnnnnnnnnnnnnnnnnnnnnnnnnnnnnnnnnnnnnnnnnnnnnnnnnnnnnnnnnnnnnnnnnnnnnnnnnnnnnnnnnnnnnnnnnnnnnnnnnnnnnnnnnnnnnnnnnnnnnnnnnnnnnnnnnnnnnnnnnnnnnnnnnnnnnnnnnnnnnnnnnnnnnnnnnnnnnnnnnnnnnnnnnnnnnnnnnnnnnnnnnnnnnnnnnnnnnnnnnnnnnnnnnnnnnnnnnnnnnnnnnnnnnnnnnnnnnnnnnnnnnnnnnnnnnnnnnnnnnnnnnnnnnnnnnnnnnnnnnnnnnnnnnnnnnnnnnnnnnnnnnnnnnnnnnnnnnnnnnnnnnnnnnnnnnnnnnnnnnnnnnnnnnnnnnnnnnnnnnnnnnnnnnnnnnnnnnnnnnnnnnnnnnnnnnnnnnnnnnnnnnnnnnnnnnnnnnnnnnnnnnnnnnnnnnnnnnnnnnnnnnnnnnnnnnnnnnnnnnnnnnnnnnnnnnnnnnnnnnnnnnnnnnnnnnnnnnnnnnnnnnnnnnnnnnnnnnnnnnnnnnnnnnnnnnnnnnnnnnnnnnnnnnnnnnnnnnnnnnnnnnnnnnnnnnnnnnnnnnnnnnnnnnnnnnnnnnnnnnnnnnnnnnnnnnnnnnnnnnnnnnnnnnnnnnnnnnnnnnnnnnnnnnnnnnnnnnnnnnnnnnnnnnnnnnnnnnnnnnnnnnnnnnnnnnnnnnnnnnnnnnnnnnnnnnnnnnnnnnnnnnnnnnnnnnnnnnnnnnnnnnnnnnnnnnnnnnnnnnnnnnnnnnnnnnnnnnnnnnnnnnnnnnnnnnnnnnnnnnnnnnnnnnnnnnnnnnnnnnnnnnnnnnnnnnnnnnnnnnnnnnnnnnnnnnnnnnnnnnnnnnnnnnnnnnnnnnnnnnnnnnnnnnnnnnnnnnnnnnnnnnnnnnnnnnnnnnnnnnnnnnnnnnnnnnnnnnnnnnnnnnnnnnnnnnnnnnnnnnnnnnnnnnnnnnnnnnnnnnnnnnnnnnnnnnnnnnnnnnnnnnnnnnnnnnnnnnnnnnnnnnnnnnnnnnnnnnnnnnnnnnnnnnnnnnnnnnnnnnnnnnnnnnnnnnnnnnnnnnnnnnnnnnnnnnnnnnnnnnnnnnnnnnnnnnnnnnnnnnnnnnnnnnnnnnnnnnnnnnnnnnnnnnnnnnnnnnnnnnnnnnnnnnnnnnnnnnnnnnnnnnnnnnnnnnnnnnnnnnnnnnnnnnnnnnnnnnnnnnnnnnnnnnnnnnnnnnnnnnnnnnnnnnnnnnnnnnnnnnnnnnnnnnnnnnnnnnnnnnnnnnnnnnnnnnnnnnnnnnnnnnnnnnnnnnnnnnnnnnnnnnnnnnnnnnnnnnnnnnnnnnnnnnnnnnnnnnnnnnnnnnnnnnnnnnnnnnnnnnnnnnnnnnnnnnnnnnnnnnnnnnnnnnnnnnnnnnnnnnnnnnnnnnnnnnnnnnnnnnnnnnnnnnnnnnnnnnnnnnnnnnnnnnnnnnnnnnnnnnnnnnnnnnnnnnnnnnnnnnnnnnnnnnnnnnnnnnnnnnnnnnnnnnnnnnnnnnnnnnnnnnnnnnnnnnnnnnnnnnnnnnnnnnnnnnnnnnnnnnnnnnnnnnnnnnnnnnnnnnnnnnnnnnnnnnnnnnnnnnnnnnnnnnnnnnnnnnnnnnnnnnnnnnnnnnnnnnnnnnnnnnnnnnnnnnnnnnnnnnnnnnnnnnnnnnnnnnnnnnnnnnnnnnnnnnnnnnnnnnnnnnnnnnnnnnnnnnnnnnnnnnnnnnnnnnnnnnnnnnnnnnnnnnnnnnnnnnnnnnnnnnnnnnnnnnnnnnnnnnnnnnnnnnnnnnnnnnnnnnnnnnnnnnnnnnnnnnnnnnnnnnnnnnnnnnnnnnnnnnnnnnnnnnnnnnnnnnnnnnnnnnnnnnnnnnnnnnnnnnnnnnnnnnnnnnnnnnnnnnnnnnnnnnnnnnnnnnnnnnnnnnnnnnnnnnnnnnnnnnnnnnnnnnnnnnnnnnnnnnnnnnnnnnnnnnnnnnnnnnnnnnnnnnnnnnnnnnnnnnnnnnnnnnnnnnnnnnnnnnnnnnnnnnnnnnnnnnnnnnnnnnnnnnnnnnnnnnnnnnnnnnnnnnnnnnnnnnnnnnnnnnnnnnnnnnnnnnnnnnnnnnnnnnnnnnnnnnnnnnnnnnnnnnnnnnnnnnnnnnnnnnnnnnnnnnnnnnnnnnnnnnnnnnnnnnnnnnnnnnnnnnnnnnnnnnnnnnnnnnnnnnnnnnnnnnnnnnnnnnnnnnnnnnnnnnnnnnnnnnnnnnnnnnnnnnnnnnnnnnnnnnnnnnnnnnnnnnnnnnnnnnnnnnnnnnnnnnnnnnnnnnnnnnnnnnnnnnnnnnnnnnnnnnnnnnnnnnnnnnnnnnnnnnnnnnnnnnnnnnnnnnnnnnnnnnnnnnnnnnnnnnnnnnnnnnnnnnnnnnnnnnnnnnnnnnnnnnnnnnnnnnnnnnnnnnnnnnnnnnnnnnnnnnnnnnnnnnnnnnnnnnnnnnnnnnnnnnnnnnnnnnnnnnnnnnnnnnnnnnnnnnnnnnnnnnnnnnnnnnnnnnnnnnnnnnnnnnnnnnnnnnnnnnnnnnnnnnnnnnnnnnnnnnnnnnnnnnnnnnnnnnnnnnnnnnnnnnnnnnnnnnnnnnnnnnnnnnnnnnnnnnnnnnnnnnnnnnnnnnnnnnnnnnnnnnnnnnnnnnnnnnnnnnnnnnnnnnnnnnnnnnnnnnnnnnnnnnnnnnnnnnnnnnnnnnnnnnnnnnnnnnnnnnnnnnnnnnnnnnnnnnnnnnnnnnnnnnnnnnnnnnnnnnnnnnnnnnnnnnnnnnnnnnnnnnnnnnnnnnnnnnnnnnnnnnnnnnnnnnnnnnnnnnnnnnnnnnnnnnnnnnnnnnnnnnnnnnnnnnnnnnnnnnnnnnnnnnnnnnnnnnnnnnnnnnnnnnnnnnnnnnnnnnnnnnnnnnnnnnnnnnnnnnnnnnnnnnnnnnnnnnnnnnnnnnnnnnnnnnnnnnnnnnnnnnnnnnnnnnnnnnnnnnnnnnnnnnnnnnnnnnnnnnnnnnnnnnnnnnnnnnnnnnnnnnnnnnnnnnnnnnnnnnnnnnnnnnnnnnnnnnnnnnnnnnnnnnnnnnnnnnnnnnnnnnnnnnnnnnnnnnnnnnnnnnnnnnnnnnnnnnnnnnnnnnnnnnnnnnnnnnnnnnnnnnnnnnnnnnnnnnnnnnnnnnnnnnnnnnnnnnnnnnnnnnnnnnnnnnnnnnnnnnnnnnnnnnnnnnnnnnnnnnnnnnnnnnnnnnnnnnnnnnnnnnnnnnnnnnnnnnnnnnnnnnnnnnnnnnnnnnnnnnnnnnnnnnnnnnnnnnnnnnnnnnnnnnnnnnnnnnnnnnnnnnnnnnnnnnnnnnnnnnnnnnnnnnnnnnnnnnnnnnnnnnnnnnnnnnnnnnnnnnnnnnnnnnnnnnnnnnnnnnnnnnnnnnnnnnnnnnnnnnnnnnnnnnnnnnnnnnnnnnnnnnnnnnnnnnnnnnnnnnnnnnnnnnnnnnnnnnnnnnnnnnnnnnnnnnnnnnnnnnnnnnnnnnnnnnnnnnnnnnnnnnnnnnnnnnnnnnnnnnnnnnnnnnnnnnnnnnnnnnnnnnnnnnnnnnnnnnnnnnnnnnnnnnnnnnnnnnnnnnnnnnnnnnnnnnnnnnnnnnnnnnnnnnnnnnnnnnnnnnnnnnnnnnnnnnnnnnnnnnnnnnnnnnnnnnnnnnnnnnnnnnnnnnnnnnnnnnnnnnnnnnnnnnnnnnnnnnnnnnnnnnnnnnnnnnnnnnnnnnnnnnnnnnnnnnnnnnnnnnnnnnnnnnnnnnnnnnnnnnnnnnnnnnnnnnnnnnnnnnnnnnnnnnnnnnnnnnnnnnnnnnnnnnnnnnnnnnnnnnnnnnnnnnnnnnnnnnnnnnnnnnnnnnnnnnnnnnnnnnnnnnnnnnnnnnnnnnnnnnnnnnnnnnnnnnnnnnnnnnnnnnnnnnnnnnnnnnnnnnnnnnnnnnnnnnnnnnnnnnnnnnnnnnnnnnnnnnnnnnnnnnnnnnnnnnnnnnnnnnnnnnnnnnnnnnnnnnnnnnnnnnnnnnnnnnnnnnnnnnnnnnnnnnnnnnnnnnnnnnnnnnnnnnnnnnnnnnnnnnnnnnnnnnnnnnnnnnnnnnnnnnnnnnnnnnnnnnnnnnnnnnnnnnnnnnnnnnnnnnnnnnnnnnnnnnnnnnnnnnnnnnnnnnnnnnnnnnnnnnnnnnnnnnnnnnnnnnnnnnnnnnnnnnnnnnnnnnnnnnnnnnnnnnnnnnnnnnnnnnnnnnnnnnnnnnnnnnnnnnnnnnnnnnnnnnnnnnnnnnnnnnnnnnnnnnnnnnnnnnnnnnnnnnnnnnnnnnnnnnnnnnnnnnnnnnnnnnnnnnnnnnnnnnnnnnnnnnnnnnnnnnnnnnnnnnnnnnnnnnnnnnnnnnnnnnnnnnnnnnnnnnnnnnnnnnnnnnnnnnnnnnnnnnnnnnnnnnnnnnnnnnnnnnnnnnnnnnnnnnnnnnnnnnnnnnnnnnnnnnnnnnnnnnnnnnnnnnnnnnnnnnnnnnnnnnnnnnnnnnnnnnnnnnnnnnnnnnnnnnnnnnnnnnnnnnnnnnnnnnnnnnnnnnnnnnnnnnnnnnnnnnnnnnnnnnnnnnnnnnnnnnnnnnnnnnnnnnnnnnnnnnnnnnnnnnnnnnnnnnnnnnnnnnnnnnnnnnnnnnnnnnnnnnnnnnnnnnnnnnnnnnnnnnnnnnnnnnnnnnnnnnnnnnnnnnnnnnnnnnnnnnnnnnnnnnnnnnnnnnnnnnnnnnnnnnnnnnnnnnnnnnnnnnnnnnnnnnnnnnnnnnnnnnnnnnnnnnnnnnnnnnnnnnnnnnnnnnnnnnnnnnnnnnnnnnnnnnnnnnnnnnnnnnnnnnnnnnnnnnnnnnnnnnnnnnnnnnnnnnnnnnnnnnnnnnnnnnnnnnnnnnnnnnnnnnnnnnnnnnnnnnnnnnnnnnnnnnnnnnnnnnnnnnnnnnnnnnnnnnnnnnnnnnnnnnnnnnnnnnnnnnnnnnnnnnnnnnnnnnnnnnnnnnnnnnnnnnnnnnnnnnnnnnnnnnnnnnnnnnnnnnnnnnnnnnnnnnnnnnnnnnnnnnnnnnnnnnnnnnnnnnnnnnnnnnnnnnnnnnnnnnnnnnnnnnnnnnnnnnnnnnnnnnnnnnnnnnnnnnnnnnnnnnnnnnnnnnnnnnnnnnnnnnnnnnnnnnnnnnnnnnnnnnnnnnnnnnnnnnnnnnnnnnnnnnnnnnnnnnnnnnnnnnnnnnnnnnnnnnnnnnnnnnnnnnnnnnnnnnnnnnnnnnnnnnnnnnnnnnnnnnnnnnnnnnnnnnnnnnnnnnnnnnnnnnnnnnnnnnnnnnnnnnnnnnnnnnnnnnnnnnnnnnnnnnnnnnnnnnnnnnnnnnnnnnnnnnnnnnnnnnnnnnnnnnnnnnnnnnnnnnnnnnnnnnnnnnnnnnnnnnnnnnnnnnnnnnnnnnnnnnnnnnnnnnnnnnnnnnnnnnnnnnnnnnnnnnnnnnnnnnnnnnnnnnnnnnnnnnnnnnnnnnnnnnnnnnnnnnnnnnnnnnnnnnnnnnnnnnnnnnnnnnnnnnnnnnnnnnnnnnnnnnnnnnnnnnnnnnnnnnnnnnnnnnnnnnnnnnnnnnnnnnnnnnnnnnnnnnnnnnnnnnnnnnnnnnnnnnnnnnnnnnnnnnnnnnnnnnnnnnnnnnnnnnnnnnnnnnnnnnnnnnnnnnnnnnnnnnnnnnnnnnnnnnnnnnnnnnnnnnnnnnnnnnnnnnnnnnnnnnnnnnnnnnnnnnnnnnnnnnnnnnnnnnnnnnnnnnnnnnnnnnnnnnnnnnnnnnnnnnnnnnnnnnnnnnnnnnnnnnnnnnnnnnnnnnnnnnnnnnnnnnnnnnnnnnnnnnnnnnnnnnnnnnnnnnnnnnnnnnnnnnnnnnnnnnnnnnnnnnnnnnnnnnnnnnnnnnnnnnnnnnnnnnnnnnnnnnnnnnnnnnnnnnnnnnnnnnnnnnnnnnnnnnnnnnnnnnnnnnnnnnnnnnnnnnnnnnnnnnnnnnnnnnnnnnnnnnnnnnnnnnnnnnnnnnnnnnnnnnnnnnnnnnnnnnnnnnnnnnnnnnnnnnnnnnnnnnnnnnnnnnnnnnnnnnnnnnnnnnnnnnnnnnnnnnnnnnnnnnnnnnnnnnnnnnnnnnnnnnnnnnnnnnnnnnnnnnnnnnnnnnnnnnnnnnnnnnnnnnnnnnnnnnnnnnnnnnnnnnnnnnnnnnnnnnnnnnnnnnnnnnnnnnnnnnnnnnnnnnnnnnnnnnnnnnnnnnnnnnnnnnnnnnnnnnnnnnnnnnnnnnnnnnnnnnnnnnnnnnnnnnnnnnnnnnnnnnnnnnnnnnnnnnnnnnnnnnnnnnnnnnnnnnnnnnnnnnnnnnnnnnnnnnnnnnnnnnnnnnnnnnnnnnnnnnnnnnnnnnnnnnnnnnnnnnnnnnnnnnnnnnnnnnnnnnnnnnnnnnnnnnnnnnnnnnnnnnnnnnnnnnnnnnnnnnnnnnnnnnnnnnnnnnnnnnnnnnnnnnnnnnnnnnnnnnnnnnnnnnnnnnnnnnnnnnnnnnnnnnnnnnnnnnnnnnnnnnnnnnnnnnnnnnnnnnnnnnnnnnnnnnnnnnnnnnnnnnnnnnnnnnnnnnnnnnnnnnnnnnnnnnnnnnnnnnnnnnnnnnnnnnnnnnnnnnnnnnnnnnnnnnnnnnnnnnnnnnnnnnnnnnnnnnnnnnnnnnnnnnnnnnnnnnnnnnnnnnnnnnnnnnnnnnnnnnnnnnnnnnnnnnnnnnnnnnnnnnnnnnnnnnnnnnnnnnnnnnnnnnnnnnnnnnnnnnnnnnnnnnnnnnnnnnnnnnnnnnnnnnnnnnnnnnnnnnnnnnnnnnnnnnnnnnnnnnnnnnnnnnnnnnnnnnnnnnnnnnnnnnnnnnnnnnnnnnnnnnnnnnnnnnnnnnnnnnnnnnnnnnnnnnnnnnnnnnnnnnnnnnnnnnnnnnnnnnnnnnnnnnnnnnnnnnnnnnnnnnnnnnnnnnnnnnnnnnnnnnnnnnnnnnnnnnnnnnnnnnnnnnnnnnnnnnnnnnnnnnnnnnnnnnnnnnnnnnnnnnnnnnnnnnnnnnnnnnnnnnnnnnnnnnnnnnnnnnnnnnnnnnnnnnnnnnnnnnnnnnnnnnnnnnnnnnnnnnnnnnnnnnnnnnnnnnnnnnnnnnnnnnnnnnnnnnnnnnnnnnnnnnnnnnnnnnnnnnnnnnnnnnnnnnnnnnnnnnnnnnnnnnnnnnnnnnnnnnnnnnnnnnnnnnnnnnnnnnnnnnnnnnnnnnnnnnnnnnnnnnnnnnnnnnnnnnnnnnnnnnnnnnnnnnnnnnnnnnnnnnnnnnnnnnnnnnnnnnnnnnnnnnnnnnnnnnnnnnnnnnnnnnnnnnnnnnnnnnnnnnnnnnnnnnnnnnnnnnnnnnnnnnnnnnnnnnnnnnnnnnnnnnnnnnnnnnnnnnnnnnnnnnnnnnnnnnnnnnnnnnnnnnnnnnnnnnnnnnnnnnnnnnnnnnnnnnnnnnnnnnnnnnnnnnnnnnnnnnnnnnnnnnnnnnnnnnnnnnnnnnnnnnnnnnnnnnnnnnnnnnnnnnnnnnnnnnnnnnnnnnnnnnnnnnnnnnnnnnnnnnnnnnnnnnnnnnnnnnnnnnnnnnnnnnnnnnnnnnnnnnnnnnnnnnnnnnnnnnnnnnnnnnnnnnnnnnnnnnnnnnnnnnnnnnnnnnnnnnnnnnnnnnnnnnnnnnnnnnnnnnnnnnnnnnnnnnnnnnnnnnnnnnnnnnnnnnnnnnnnnnnnnnnnnnnnnnnnnnnnnnnnnnnnnnnnnnnnnnnnnnnnnnnnnnnnnnnnnnnnnnnnnnnnnnnnnnnnnnnnnnnnnnnnnnnnnnnnnnnnnnnnnnnnnnnnnnnnnnnnnnnnnnnnnnnnnnnnnnnnnnnnnnnnnnnnnnnnnnnnnnnnnnnnnnnnnnnnnnnnnnnnnnnnnnnnnnnnnnnnnnnnnnnnnnnnnnnnnnnnnnnnnnnnnnnnnnnnnnnnnnnnnnnnnnnnnnnnnnnnnnnnnnnnnnnnnnnnnnnnnnnnnnnnnnnnnnnnnnnnnnnnnnnnnnnnnnnnnnnnnnnnnnnnnnnnnnnnnnnnnnnnnnnnnnnnnnnnnnnnnnnnnnnnnnnnnnnnnnnnnnnnnnnnnnnnnnnnnnnnnnnnnnnnnnnnnnnnnnnnnnnnnnnnnnnnnnnnnnnnnnnnnnnnnnnnnnnnnnnnnnnnnnnnnnnnnnnnnnnnnnnnnnnnnnnnnnnnnnnnnnnnnnnnnnnnnnnnnnnnnnnnnnnnnnnnnnnnnnnnnnnnnnnnnnnnnnnnnnnnnnnnnnnnnnnnnnnnnnnnnnnnnnnnnnnnnnnnnnnnnnnnnnnnnnnnnnnnnnnnnnnnnnnnnnnnnnnnnnnnnnnnnnnnnnnnnnnnnnnnnnnnnnnnnnnnnnnnnnnnnnnnnnnnnnnnnnnnnnnnnnnnnnnnnnnnnnnnnnnnnnnnnnnnnnnnnnnnnnnnnnnnnnnnnnnnnnnnnnnnnnnnnnnnnnnnnnnnnnnnnnnnnnnnnnnnnnnnnnnnnnnnnnnnnnnnnnnnnnnnnnnnnnnnnnnnnnnnnnnnnnnnnnnnnnnnnnnnnnnnnnnnnnnnnnnnnnnnnnnnnnnnnnnnnnnnnnnnnnnnnnnnnnnnnnnnnnnnnnnnnnnnnnnnnnnnnnnnnnnnnnnnnnnnnnnnnnnnnnnnnnnnnnnnnnnnnnnnnnnnnnnnnnnnnnnnnnnnnnnnnnnnnnnnnnnnnnnnnnnnnnnnnnnnnnnnnnnnnnnnnnnnnnnnnnnnnnnnnnnnnnnnnnnnnnnnnnnnnnnnnnnnnnnnnnnnnnnnnnnnnnnnnnnnnnnnnnnnnnnnnnnnnnnnnnnnnnnnnnnnnnnnnnnnnnnnnnnnnnnnnnnnnnnnnnnnnnnnnnnnnnnnnnnnnnnnnnnnnnnnnnnnnnnnnnnnnnnnnnnnnnnnnnnnnnnnnnnnnnnnnnnnnnnnnnnnnnnnnnnnnnnnnnnnnnnnnnnnnnnnnnnnnnnnnnnnnnnnnnnnnnnnnnnnnnnnnnnnnnnnnnnnnnnnnnnnnnnnnnnnnnnnnnnnnnnnnnnnnnnnnnnnnnnnnnnnnnnnnnnnnnnnnnnnnnnnnnnnnnnnnnnnnnnnnnnnnnnnnnnnnnnnnnnnnnnnnnnnnnnnnnnnnnnnnnnnnnnnnnnnnnnnnnnnnnnnnnnnnnnnnnnnnnnnnnnnnnnnnnnnnnnnnnnnnnnnnnnnnnnnnnnnnnnnnnnnnnnnnnnnnnnnnnnnnnnnnnnnnnnnnnnnnnnnnnnnnnnnnnnnnnnnnnnnnnnnnnnnnnnnnnnnnnnnnnnnnnnnnnnnnnnnnnnnnnnnnnnnnnnnnnnnnnnnnnnnnnnnnnnnnnnnnnnnnnnnnnnnnnnnnnnnnnnnnnnnnnnnnnnnnnnnnnnnnnnnnnnnnnnnnnnnnnnnnnnnnnnnnnnnnnnnnnnnnnnnnnnnnnnnnnnnnnnnnnnnnnnnnnnnnnnnnnnnnnnnnnnnnnnnnnnnnnnnnnnnnnnnnnnnnnnnnnnnnnnnnnnnnnnnnnnnnnnnnnnnnnnnnnnnnnnnnnnnnnnnnnnnnnnnnnnnnnnnnnnnnnnnnnnnnnnnnnnnnnnnnnnnnnnnnnnnnnnnnnnnnnnnnnnnnnnnnnnnnnnnnnnnnnnnnnnnnnnnnnnnnnnnnnnnnnnnnnnnnnnnnnnnnnnnnnnnnnnnnnnnnnnnnnnnnnnnnnnnnnnnnnnnnnnnnnnnnnnnnnnnnnnnnnnnnnnnnnnnnnnnnnnnnnnnnnnnnnnnnnnnnnnnnnnnnnnnnnnnnnnnnnnnnnnnnnnnnnnnnnnnnnnnnnnnnnnnnnnnnnnnnnnnnnnnnnnnnnnnnnnnnnnnnnnnnnnnnnnnnnnnnnnnnnnnnnnnnnnnnnnnnnnnnnnnnnnnnnnnnnnnnnnnnnnnnnnnnnnnnnnnnnnnnnnnnnnnnnnnnnnnnnnnnnnnnnnnnnnnnnnnnnnnnnnnnnnnnnnnnnnnnnnnnnnnnnnnnnnnnnnnnnnnnnnnnnnnnnnnnnnnnnnnnnnnnnnnnnnnnnnnnnnnnnnnnnnnnnnnnnnnnnnnnnnnnnnnnnnnnnnnnnnnnnnnnnnnnnnnnnnnnnnnnnnnnnnnnnnnnnnnnnnnnnnnnnnnnnnnnnnnnnnnnnnnnnnnnnnnnnnnnnnnnnnnnnnnnnnnnnnnnnnnnnnnnnnnnnnnnnnnnnnnnnnnnnnnnnnnnnnnnnnnnnnnnnnnnnnnnnnnnnnnnnnnnnnnnnnnnnnnnnnnnnnnnnnnnnnnnnnnnnnnnnnnnnnnnnnnnnnnnnnnnnnnnnnnnnnnnnnnnnnnnnnnnnnnnnnnnnnnnnnnnnnnnnnnnnnnnnnnnnnnnnnnnnnnnnnnnnnnnnnnnnnnnnnnnnnnnnnnnnnnnnnnnnnnnnnnnnnnnnnnnnnnnnnnnnnnnnnnnnnnnnnnnnnnnnnnnnnnnnnnnnnnnnnnnnnnnnnnnnnnnnnnnnnnnnnnnnnnnnnnnnnnnnnnnnnnnnnnnnnnnnnnnnnnnnnnnnnnnnnnnnnnnnnnnnnnnnnnnnnnnnnnnnnnnnnnnnnnnnnnnnnnnnnnnnnnnnnnnnnnnnnnnnnnnnnnnnnnnnnnnnnnnnnnnnnnnnnnnnnnnnnnnnnnnnnnnnnnnnnnnnnnnnnnnnnnnnnnnnnnnnnnnnnnnnnnnnnnnnnnnnnnnnnnnnnnnnnnnnnnnnnnnnnnnnnnnnnnnnnnnnnnnnnnnnnnnnnnnnnnnnnnnnnnnnnnnnnnnnnnnnnnnnnnnnnnnnnnnnnnnnnnnnnnnnnnnnnnnnnnnnnnnnnnnnnnnnnnnnnnnnnnnnnnnnnnnnnnnnnnnnnnnnnnnnnnnnnnnnnnnnnnnnnnnnnnnnnnnnnnnnnnnnnnnnnnnnnnnnnnnnnnnnnnnnnnnnnnnnnnnnnnnnnnnnnnnnnnnnnnnnnnnnnnnnnnnnnnnnnnnnnnnnnnnnnnnnnnnnnnnnnnnnnnnnnnnnnnnnnnnnnnnnnnnnnnnnnnnnnnnnnnnnnnnnnnnnnnnnnnnnnnnnnnnnnnnnnnnnnnnnnnnnnnnnnnnnnnnnnnnnnnnnnnnnnnnnnnnnnnnnnnnnnnnnnnnnnnnnnnnnnnnnnnnnnnnnnnnnnnnnnnnnnnnnnnnnnnnnnnnnnnnnnnnnnnnnnnnnnnnnnnnnnnnnnnnnnnnnnnnnnnnnnnnnnnnnnnnnnnnnnnnnnnnnnnnnnnnnnnnnnnnnnnnnnnnnnnnnnnnnnnnnnnnnnnnnnnnnnnnnnnnnnnnnnnnnnnnnnnnnnnnnnnnnnnnnnnnnnnnnnnnnnnnnnnnnnnnnnnnnnnnnnnnnnnnnnnnnnnnnnnnnnnnnnnnnnnnnnnnnnnnnnnnnnnnnnnnnnnnnnnnnnnnnnnnnnnnnnnnnnnnnnnnnnnnnnnnnnnnnnnnnnnnnnnnnnnnnnnnnnnnnnnnnnnnnnnnnnnnnnnnnnnnnnnnnnnnnnnnnnnnnnnnnnnnnnnnnnnnnnnnnnnnnnnnnnnnnnnnnnnnnnnnnnnnnnnnnnnnnnnnnnnnnnnnnnnnnnnnnnnnnnnnnnnnnnnnnnnnnnnnnnnnnnnnnnnnnnnnnnnnnnnnnnnnnnnnnnnnnnnnnnnnnnnnnnnnnnnnnnnnnnnnnnnnnnnnnnnnnnnnnnnnnnnnnnnnnnnnnnnnnnnnnnnnnnnnnnnnnnnnnnnnnnnnnnnnnnnnnnnnnnnnnnnnnnnnnnnnnnnnnnnnnnnnnnnnnnnnnnnnnnnnnnnnnnnnnnnnnnnnnnnnnnnnnnnnnnnnnnnnnnnnnnnnnnnnnnnnnnnnnnnnnnnnnnnnnnnnnnnnnnnnnnnnnnnnnnnnnnnnnnnnnnnnnnnnnnnnnnnnnnnnnnnnnnnnnnnnnnnnnnnnnnnnnnnnnnnnnnnnnnnnnnnnnnnnnnnnnnnnnnnnnnnnnnnnnnnnnnnnnnnnnnnnnnnnnnnnnnnnnnnnnnnnnnnnnnnnnnnnnnnnnnnnnnnnnnnnnnnnnnnnnnnnnnnnnnnnnnnnnnnnnnnnnnnnnnnnnnnnnnnnnnnnnnnnnnnnnnnnnnnnnnnnnnnnnnnnnnnnnnnnnnnnnnnnnnnnnnnnnnnnnnnnnnnnnnnnnnnnnnnnnnnnnnnnnnnnnnnnnnnnnnnnnnnnnnnnnnnnnnnnnnnnnnnnnnnnnnnnnnnnnnnnnnnnnnnnnnnnnnnnnnnnnnnnnnnnnnnnnnnnnnnnnnnnnnnnnnnnnnnnnnnnnnnnnnnnnnnnnnnnnnnnnnnnnnnnnnnnnnnnnnnnnnnnnnnnnnnnnnnnnnnnnnnnnnnnnnnnnnnnnnnnnnnnnnnnnnnnnnnnnnnnnnnnnnnnnnnnnnnnnnnnnnnnnnnnnnnnnnnnnnnnnnnnnnnnnnnnnnnnnnnnnnnnnnnnnnnnnnnnnnnnnnnnnnnnnnnnnnnnnnnnnnnnnnnnnnnnnnnnnnnnnnnnnnnnnnnnnnnnnnnnnnnnnnnnnnnnnnnnnnnnnnnnnnnnnnnnnnnnnnnnnnnnnnnnnnnnnnnnnnnnnnnnnnnnnnnnnnnnnnnnnnnnnnnnnnnnnnnnnnnnnnnnnnnnnnnnnnnnnnnnnnnnnnnnnnnnnnnnnnnnnnnnnnnnnnnnnnnnnnnnnnnnnnnnnnnnnnnnnnnnnnnnnnnnnnnnnnnnnnnnnnnnnnnnnnnnnnnnnnnnnnnnnnnnnnnnnnnnnnnnnnnnnnnnnnnnnnnnnnnnnnnnnnnnnnnnnnnnnnnnnnnnnnnnnnnnnnnnnnnnnnnnnnnnnnnnnnnnnnnnnnnnnnnnnnnnnnnnnnnnnnnnnnnnnnnnnnnnnnnnnnnnnnnnnnnnnnnnnnnnnnnnnnnnnnnnnnnnnnnnnnnnnnnnnnnnnnnnnnnnnnnnnnnnnnnnnnnnnnnnnnnnnnnnnnnnnnnnnnnnnnnnnnnnnnnnnnnnnnnnnnnnnnnnnnnnnnnnnnnnnnnnnnnnnnnnnnnnnnnnnnnnnnnnnnnnnnnnnnnnnnnnnnnnnnnnnnnnnnnnnnnnnnnnnnnnnnnnnnnnnnnnnnnnnnnnnnnnnnnnnnnnnnnnnnnnnnnnnnnnnnnnnnnnnnnnnnnnnnnnnnnnnnnnnnnnnnnnnnnnnnnnnnnnnnnnnnnnnnnnnnnnnnnnnnnnnnnnnnnnnnnnnnnnnnnnnnnnnnnnnnnnnnnnnnnnnnnnnnnnnnnnnnnnnnnnnnnnnnnnnnnnnnnnnnnnnnnnnnnnnnnnnnnnnnnnnnnnnnnnnnnnnnnnnnnnnnnnnnnnnnnnnnnnnnnnnnnnnnnnnnnnnnnnnnnnnnnnnnnnnnnnnnnnnnnnnnnnnnnnnnnnnnnnnnnnnnnnnnnnnnnnnnnnnnnnnnnnnnnnnnnnnnnnnnnnnnnnnnnnnnnnnnnnnnnnnnnnnnnnnnnnnnnnnnnnnnnnnnnnnnnnnnnnnnnnnnnnnnnnnnnnnnnnnnnnnnnnnnnnnnnnnnnnnnnnnnnnnnnnnnnnnnnnnnnnnnnnnnnnnnnnnnnnnnnnnnnnnnnnnnnnnnnnnnnnnnnnnnnnnnnnnnnnnnnnnnnnnnnnnnnnnnnnnnnnnnnnnnnnnnnnnnnnnnnnnnnnnnnnnnnnnnnnnnnnnnnnnnnnnnnnnnnnnnnnnnnnnnnnnnnnnnnnnnnnnnnnnnnnnnnnnnnnnnnnnnnnnnnnnnnnnnnnnnnnnnnnnnnnnnnnnnnnnnnnnnnnnnnnnnnnnnnnnnnnnnnnnnnnnnnnnnnnnnnnnnnnnnnnnnnnnnnnnnnnnnnnnnnnnnnnnnnnnnnnnnnnnnnnnnnnnnnnnnnnnnnnnnnnnnnnnnnnnnnnnnnnnnnnnnnnnnnnnnnnnnnnnnnnnnnnnnnnnnnnnnnnnnnnnnnnnnnnnnnnnnnnnnnnnnnnnnnnnnnnnnnnnnnnnnnnnnnnnnnnnnnnnnnnnnnnnnnnnnnnnnnnnnnnnnnnnnnnnnnnnnnnnnnnnnnnnnnnnnnnnnnnnnnnnnnnnnnnnnnnnnnnnnnnnnnnnnnnnnnnnnnnnnnnnnnnnnnnnnnnnnnnnnnnnnnnnnnnnnnnnnnnnnnnnnnnnnnnnnnnnnnnnnnnnnnnnnnnnnnnnnnnnnnnnnnnnnnnnnnnnnnnnnnnnnnnnnnnnnnnnnnnnnnnnnnnnnnnnnnnnnnnnnnnnnnnnnnnnnnnnnnnnnnnnnnnnnnnnnnnnnnnnnnnnnnnnnnnnnnnnnnnnnnnnnnnnnnnnnnnnnnnnnnnnnnnnnnnnnnnnnnnnnnnnnnnnnnnnnnnnnnnnnnnnnnnnnnnnnnnnnnnnnnnnnnnnnnnnnnnnnnnnnnnnnnnnnnnnnnnnnnnnnnnnnnnnnnnnnnnnnnnnnnnnnnnnnnnnnnnnnnnnnnnnnnnnnnnnnnnnnnnnnnnnnnnnnnnnnnnnnnnnnnnnnnnnnnnnnnnnnnnnnnnnnnnnnnnnnnnnnnnnnnnnnnnnnnnnnnnnnnnnnnnnnnnnnnnnnnnnnnnnnnnnnnnnnnnnnnnnnnnnnnnnnnnnnnnnnnnnnnnnnnnnnnnnnnnnnnnnnnnnnnnnnnnnnnnnnnnnnnnnnnnnnnnnnnnnnnnnnnnnnnnnnnnnnnnnnnnnnnnnnnnnnnnnnnnnnnnnnnnnnnnnnnnnnnnnnnnnnnnnnnnnnnnnnnnnnnnnnnnnnnnnnnnnnnnnnnnnnnnnnnnnnnnnnnnnnnnnnnnnnnnnnnnnnnnnnnnnnnnnnnnnnnnnnnnnnnnnnnnnnnnnnnnnnnnnnnnnnnnnnnnnnnnnnnnnnnnnnnnnnnnnnnnnnnnnnnnnnnnnnnnnnnnnnnnnnnnnnnnnnnnnnnnnnnnnnnnnnnnnnnnnnnnnnnnnnnnnnnnnnnnnnnnnnnnnnnnnnnnnnnnnnnnnnnnnnnnnnnnnnnnnnnnnnnnnnnnnnnnnnnnnnnnnnnnnnnnnnnnnnnnnnnnnnnnnnnnnnnnnnnnnnnnnnnnnnnnnnnnnnnnnnnnnnnnnnnnnnnnnnnnnnnnnnnnnnnnnnnnnnnnnnnnnnnnnnnnnnnnnnnnnnnnnnnnnnnnnnnnnnnnnnnnnnnnnnnnnnnnnnnnnnnnnnnnnnnnnnnnnnnnnnnnnnnnnnnnnnnnnnnnnnnnnnnnnnnnnnnnnnnnnnnnnnnnnnnnnnnnnnnnnnnnnnnnnnnnnnnnnnnnnnnnnnnnnnnnnnnnnnnnnnnnnnnnnnnnnnnnnnnnnnnnnnnnnnnnnnnnnnnnnnnnnnnnnnnnnnnnnnnnnnnnnnnnnnnnnnnnnnnnnnnnnnnnnnnnnnnnnnnnnnnnnnnnnnnnnnnnnnnnnnnnnnnnnnnnnnnnnnnnnnnnnnnnnnnnnnnnnnnnnnnnnnnnnnnnnnnnnnnnnnnnnnnnnnnnnnnnnnnnnnnnnnnnnnnnnnnnnnnnnnnnnnnnnnnnnnnnnnnnnnnnnnnnnnnnnnnnnnnnnnnnnnnnnnnnnnnnnnnnnnnnnnnnnnnnnnnnnnnnnnnnnnnnnnnnnnnnnnnnnnnnnnnnnnnnnnnnnnnnnnnnnnnnnnnnnnnnnnnnnnnnnnnnnnnnnnnnnnnnnnnnnnnnnnnnnnnnnnnnnnnnnnnnnnnnnnnnnnnnnnnnnnnnnnnnnnnnnnnnnnnnnnnnnnnnnnnnnnnnnnnnnnnnnnnnnnnnnnnnnnnnnnnnnnnnnnnnnnnnnnnnnnnnnnnnnnnnnnnnnnnnnnnnnnnnnnnnnnnnnnnnnnnnnnnnnnnnnnnnnnnnnnnnnnnnnnnnnnnnnnnnnnnnnnnnnnnnnnnnnnnnnnnnnnnnnnnnnnnnnnnnnnnnnnnnnnnnnnnnnnnnnnnnnnnnnnnnnnnnnnnnnnnnnnnnnnnnnnnnnnnnnnnnnnnnnnnnnnnnnnnnnnnnnnnnnnnnnnnnnnnnnnnnnnnnnnnnnnnnnnnnnnnnnnnnnnnnnnnnnnnnnnnnnnnnnnnnnnnnnnnnnnnnnnnnnnnnnnnnnnnnnnnnnnnnnnnnnnnnnnnnnnnnnnnnnnnnnnnnnnnnnnnnnnnnnnnnnnnnnnnnnnnnnnnnnnnnnnnnnnnnnnnnnnnnnnnnnnnnnnnnnnnnnnnnnnnnnnnnnnnnnnnnnnnnnnnnnnnnnnnnnnnnnnnnnnnnnnnnnnnnnnnnnnnnnnnnnnnnnnnnnnnnnnnnnnnnnnnnnnnnnnnnnnnnnnnnnnnnnnnnnnnnnnnnnnnnnnnnnnnnnnnnnnnnnnnnnnnnnnnnnnnnnnnnnnnnnnnnnnnnnnnnnnnnnnnnnnnnnnnnnnnnnnnnnnnnnnnnnnnnnnnnnnnnnnnnnnnnnnnnnnnnnnnnnnnnnnnnnnnnnnnnnnnnnnnnnnnnnnnnnnnnnnnnnnnnnnnnnnnnnnnnnnnnnnnnnnnnnnnnnnnnnnnnnnnnnnnnnnnnnnnnnnnnnnnnnnnnnnnnnnnnnnnnnnnnnnnnnnnnnnnnnnnnnnnnnnnnnnnnnnnnnnnnnnnnnnnnnnnnnnnnnnnnnnnnnnnnnnnnnnnnnnnnnnnnnnnnnnnnnnnnnnnnnnnnnnnnnnnnnnnnnnnnnnnnnnnnnnnnnnnnnnnnnnnnnnnnnnnnnnnnnnnnnnnnnnnnnnnnnnnnnnnnnnnnnnnnnnnnnnnnnnnnnnnnnnnnnnnnnnnnnnnnnnnnnnnnnnnnnnnnnnnnnnnnnnnnnnnnnnnnnnnnnnnnnnnnnnnnnnnnnnnnnnnnnnnnnnnnnnnnnnnnnnnnnnnnnnnnnnnnnnnnnnnnnnnnnnnnnnnnnnnnnnnnnnnnnnnnnnnnnnnnnnnnnnnnnnnnnnnnnnnnnnnnnnnnnnnnnnnnnnnnnnnnnnnnnnnnnnnnnnnnnnnnnnnnnnnnnnnnnnnnnnnnnnnnnnnnnnnnnnnnnnnnnnnnnnnnnnnnnnnnnnnnnnnnnnnnnnnnnnnnnnnnnnnnnnnnnnnnnnnnnnnnnnnnnnnnnnnnnnnnnnnnnnnnnnnnnnnnnnnnnnnnnnnnnnnnnnnnnnnnnnnnnnnnnnnnnnnnnnnnnnnnnnnnnnnnnnnnnnnnnnnnnnnnnnnnnnnnnnnnnnnnnnnnnnnnnnnnnnnnnnnnnnnnnnnnnnnnnnnnnnnnnnnnnnnnnnnnnnnnnnnnnnnnnnnnnnnnnnnnnnnnnnnnnnnnnnnnnnnnnnnnnnnnnnnnnnnnnnnnnnnnnnnnnnnnnnnnnnnnnnnnnnnnnnnnnnnnnnnnnnnnnnnnnnnnnnnnnnnnnnnnnnnnnnnnnnnnnnnnnnnnnnnnnnnnnnnnnnnnnnnnnnnnnnnnnnnnnnnnnnnnnnnnnnnnnnnnnnnnnnnnnnnnnnnnnnnnnnnnnnnnnnnnnnnnnnnnnnnnnnnnnnnnnnnnnnnnnnnnnnnnnnnnnnnnnnnnnnnnnnnnnnnnnnnnnnnnnnnnnnnnnnnnnnnnnnnnnnnnnnnnnnnnnnnnnnnnnnnnnnnnnnnnnnnnnnnnnnnnnnnnnnnnnnnnnnnnnnnnnnnnnnnnnnnnnnnnnnnnnnnnnnnnnnnnnnnnnnnnnnnnnnnnnnnnnnnnnnnnnnnnnnnnnnnnnnnnnnnnnnnnnnnnnnnnnnnnnnnnnnnnnnnnnnnnnnnnnnnnnnnnnnnnnnnnnnnnnnnnnnnnnnnnnnnnnnnnnnnnnnnnnnnnnnnnnnnnnnnnnnnnnnnnnnnnnnnnnnnnnnnnnnnnnnnnnnnnnnnnnnnnnnnnnnnnnnnnnnnnnnnnnnnnnnnnnnnnnnnnnnnnnnnnnnnnnnnnnnnnnnnnnnnnnnnnnnnnnnnnnnnnnnnnnnnnnnnnnnnnnnnnnnnnnnnnnnnnnnnnnnnnnnnnnnnnnnnnnnnnnnnnnnnnnnnnnnnnnnnnnnnnnnnnnnnnnnnnnnnnnnnnnnnnnnnnnnnnnnnnnnnnnnnnnnnnnnnnnnnnnnnnnnnnnnnnnnnnnnnnnnnnnnnnnnnnnnnnnnnnnnnnnnnnnnnnnnnnnnnnnnnnnnnnnnnnnnnnnnnnnnnnnnnnnnnnnnnnnnnnnnnnnnnnnnnnnnnnnnnnnnnnnnnnnnnnnnnnnnnnnnnnnnnnnnnnnnnnnnnnnnnnnnnnnnnnnnnnnnnnnnnnnnnnnnnnnnnnnnnnnnnnnnnnnnnnnnnnnnnnnnnnnnnnnnnnnnnnnnnnnnnnnnnnnnnnnnnnnnnnnnnnnnnnnnnnnnnnnnnnnnnnnnnnnnnnnnnnnnnnnnnnnnnnnnnnnnnnnnnnnnnnnnnnnnnnnnnnnnnnnnnnnnnnnnnnnnnnnnnnnnnnnnnnnnnnnnnnnnnnnnnnnnnnnnnnnnnnnnnnnnnnnnnnnnnnnnnnnnnnnnnnnnnnnnnnnnnnnnnnnnnnnnnnnnnnnnnnnnnnnnnnnnnnnnnnnnnnnnnnnnnnnnnnnnnnnnnnnnnnnnnnnnnnnnnnnnnnnnnnnnnnnnnnnnnnnnnnnnnnnnnnnnnnnnnnnnnnnnnnnnnnnnnnnnnnnnnnnnnnnnnnnnnnnnnnnnnnnnnnnnnnnnnnnnnnnnnnnnnnnnnnnnnnnnnnnnnnnnnnnnnnnnnnnnnnnnnnnnnnnnnnnnnnnnnnnnnnnnnnnnnnnnnnnnnnnnnnnnnnnnnnnnnnnnnnnnnnnnnnnnnnnnnnnnnnnnnnnnnnnnnnnnnnnnnnnnnnnnnnnnnnnnnnnnnnnnnnnnnnnnnnnnnnnnnnnnnnnnnnnnnnnnnnnnnnnnnnnnnnnnnnnnnnnnnnnnnnnnnnnnnnnnnnnnnnnnnnnnnnnnnnnnnnnnnnnnnnnnnnnnnnnnnnnnnnnnnnnnnnnnnnnnnnnnnnnnnnnnnnnnnnnnnnnnnnnnnnnnnnnnnnnnnnnnnnnnnnnnnnnnnnnnnnnnnnnnnnnnnnnnnnnnnnnnnnnnnnnnnnnnnnnnnnnnnnnnnnnnnnnnnnnnnnnnnnnnnnnnnnnnnnnnnnnnnnnnnnnnnnnnnnnnnnnnnnnnnnnnnnnnnnnnnnnnnnnnnnnnnnnnnnnnnnnnnnnnnnnnnnnnnnnnnnnnnnnnnnnnnnnnnnnnnnnnnnnnnnnnnnnnnnnnnnnnnnnnnnnnnnnnnnnnnnnnnnnnnnnnnnnnnnnnnnnnnnnnnnnnnnnnnnnnnnnnnnnnnnnnnnnnnnnnnnnnnnnnnnnnnnnnnnnnnnnnnnnnnnnnnnnnnnnnnnnnnnnnnnnnnnnnnnnnnnnnnnnnnnnnnnnnnnnnnnnnnnnnnnnnnnnnnnnnnnnnnnnnnnnnnnnnnnnnnnnnnnnnnnnnnnnnnnnnnnnnnnnnnnnnnnnnnnnnnnnnnnnnnnnnnnnnnnnnnnnnnnnnnnnnnnnnnnnnnnnnnnnnnnnnnnnnnnnnnnnnnnnnnnnnnnnnnnnnnnnnnnnnnnnnnnnnnnnnnnnnnnnnnnnnnnnnnnnnnnnnnnnnnnnnnnnnnnnnnnnnnnnnnnnnnnnnnnnnnnnnnnnnnnnnnnnnnnnnnnnnnnnnnnnnnnnnnnnnnnnnnnnnnnnnnnnnnnnnnnnnnnnnnnnnnnnnnnnnnnnnnnnnnnnnnnnnnnnnnnnnnnnnnnnnnnnnnnnnnnnnnnnnnnnnnnnnnnnnnnnnnnnnnnnnnnnnnnnnnnnnnnnnnnnnnnnnnnnnnnnnnnnnnnnnnnnnnnnnnnnnnnnnnnnnnnnnnnnnnnnnnnnnnnnnnnnnnnnnnnnnnnnnnnnnnnnnnnnnnnnnnnnnnnnnnnnnnnnnnnnnnnnnnnnnnnnnnnnnnnnnnnnnnnnnnnnnnnnnnnnnnnnnnnnnnnnnnnnnnnnnnnnnnnnnnnnnnnnnnnnnnnnnnnnnnnnnnnnnnnnnnnnnnnnnnnnnnnnnnnnnnnnnnnnnnnnnnnnnnnnnnnnnnnnnnnnnnnnnnnnnnnnnnnnnnnnnnnnnnnnnnnnnnnnnnnnnnnnnnnnnnnnnnnnnnnnnnnnnnnnnnnnnnnnnnnnnnnnnnnnnnnnnnnnnnnnnnnnnnnnnnnnnnnnnnnnnnnnnnnnnnnnnnnnnnnnnnnnnnnnnnnnnnnnnnnnnnnnnnnnnnnnnnnnnnnnnnnnnnnnnnnnnnnnnnnnnnnnnnnnnnnnnnnnnnnnnnnnnnnnnnnnnnnnnnnnnnnnnnnnnnnnnnnnnnnnnnnnnnnnnnnnnnnnnnnnnnnnnnnnnnnnnnnnnnnnnnnnnnnnnnnnnnnnnnnnnnnnnnnnnnnnnnnnnnnnnnnnnnnnnnnnnnnnnnnnnnnnnnnnnnnnnnnnnnnnnnnnnnnnnnnnnnnnnnnnnnnnnnnnnnnnnnnnnnnnnnnnnnnnnnnnnnnnnnnnnnnnnnnnnnnnnnnnnnnnnnnnnnnnnnnnnnnnnnnnnnnnnnnnnnnnnnnnnnnnnnnnnnnnnnnnnnnnnnnnnnnnnnnnnnnnnnnnnnnnnnnnnnnnnnnnnnnnnnnnnnnnnnnnnnnnnnnnnnnnnnnnnnnnnnnnnnnnnnnnnnnnnnnnnnnnnnnnnnnnnnnnnnnnnnnnnnnnnnnnnnnnnnnnnnnnnnnnnnnnnnnnnnnnnnnnnnnnnnnnnnnnnnnnnnnnnnnnnnnnnnnnnnnnnnnnnnnnnnnnnnnnnnnnnnnnnnnnnnnnnnnnnnnnnnnnnnnnnnnnnnnnnnnnnnnnnnnnnnnnnnnnnnnnnnnnnnnnnnnnnnnnnnnnnnnnnnnnnnnnnnnnnnnnnnnnnnnnnnnnnnnnnnnnnnnnnnnnnnnnnnnnnnnnnnnnnnnnnnnnnnnnnnnnnnnnnnnnnnnnnnnnnnnnnnnnnnnnnnnnnnnnnnnnnnnnnnnnnnnnnnnnnnnnnnnnnnnnnnnnnnnnnnnnnnnnnnnnnnnnnnnnnnnnnnnnnnnnnnnnnnnnnnnnnnnnnnnnnnnnnnnnnnnnnnnnnnnnnnnnnnnnnnnnnnnnnnnnnnnnnnnnnnnnnnnnnnnnnnnnnnnnnnnnnnnnnnnnnnnnnnnnnnnnnnnnnnnnnnnnnnnnnnnnnnnnnnnnnnnnnnnnnnnnnnnnnnnnnnnnnnnnnnnnnnnnnnnnnnnnnnnnnnnnnnnnnnnnnnnnnnnnnnnnnnnnnnnnnnnnnnnnnnnnnnnnnnnnnnnnnnnnnnnnnnnnnnnnnnnnnnnnnnnnnnnnnnnnnnnnnnnnnnnnnnnnnnnnnnnnnnnnnnnnnnnnnnnnnnnnnnnnnnnnnnnnnnnnnnnnnnnnnnnnnnnnnnnnnnnnnnnnnnnnnnnnnnnnnnnnnnnnnnnnnnnnnnnnnnnnnnnnnnnnnnnnnnnnnnnnnnnnnnnnnnnnnnnnnnnnnnnnnnnnnnnnnnnnnnnnnnnnnnnnnnnnnnnnnnnnnnnnnnnnnnnnnnnnnnnnnnnnnnnnnnnnnnnnnnnnnnnnnnnnnnnnnnnnnnnnnnnnnnnnnnnnnnnnnnnnnnnnnnnnnnnnnnnnnnnnnnnnnnnnnnnnnnnnnnnnnnnnnnnnnnnnnnnnnnnnnnnnnnnnnnnnnnnnnnnnnnnnnnnnnnnnnnnnnnnnnnnnnnnnnnnnnnnnnnnnnnnnnnnnnnnnnnnnnnnnnnnnnnnnnnnnnnnnnnnnnnnnnnnnnnnnnnnnnnnnnnnnnnnnnnnnnnnnnnnnnnnnnnnnnnnnnnnnnnnnnnnnnnnnnnnnnnnnnnnnnnnnnnnnnnnnnnnnnnnnnnnnnnnnnnnnnnnnnnnnnnnnnnnnnnnnnnnnnnnnnnnnnnnnnnnnnnnnnnnnnnnnnnnnnnnnnnnnnnnnnnnnnnnnnnnnnnnnnnnnnnnnnnnnnnnnnnnnnnnnnnnnnnnnnnnnnnnnnnnnnnnnnnnnnnnnnnnnnnnnnnnnnnnnnnnnnnnnnnnnnnnnnnnnnnnnnnnnnnnnnnnnnnnnnnnnnnnnnnnnnnnnnnnnnnnnnnnnnnnnnnnnnnnnnnnnnnnnnnnnnnnnnnnnnnnnnnnnnnnnnnnnnnnnnnnnnnnnnnnnnnnnnnnnnnnnnnnnnnnnnnnnnnnnnnnnnnnnnnnnnnnnnnnnnnnnnnnnnnnnnnnnnnnnnnnnnnnnnnnnnnnnnnnnnnnnnnnnnnnnnnnnnnnnnnnnnnnnnnnnnnnnnnnnnnnnnnnnnnnnnnnnnnnnnnnnnnnnnnnnnnnnnnnnnnnnnnnnnnnnnnnnnnnnnnnnnnnnnnnnnnnnnnnnnnnnnnnnnnnnnnnnnnnnnnnnnnnnnnnnnnnnnnnnnnnnnnnnnnnnnnnnnnnnnnnnnnnnnnnnnnnnnnnnnnnnnnnnnnnnnnnnnnnnnnnnnnnnnnnnnnnnnnnnnnnnnnnnnnnnnnnnnnnnnnnnnnnnnnnnnnnnnnnnnnnnnnnnnnnnnnnnnnnnnnnnnnnnnnnnnnnnnnnnnnnnnnnnnnnnnnnnnnnnnnnnnnnnnnnnnnnnnnnnnnnnnnnnnnnnnnnnnnnnnnnnnnnnnnnnnnnnnnnnnnnnnnnnnnnnnnnnnnnnnnnnnnnnnnnnnnnnnnnnnnnnnnnnnnnnnnnnnnnnnnnnnnnnnnnnnnnnnnnnnnnnnnnnnnnnnnnnnnnnnnnnnnnnnnnnnnnnnnnnnnnnnnnnnnnnnnnnnnnnnnnnnnnnnnnnnnnnnnnnnnnnnnnnnnnnnnnnnnnnnnnnnnnnnnnnnnnnnnnnnnnnnnnnnnnnnnnnnnnnnnnnnnnnnnnnnnnnnnnnnnnnnnnnnnnnnnnnnnnnnnnnnnnnnnnnnnnnnnnnnnnnnnnnnnnnnnnnnnnnnnnnnnnnnnnnnnnnnnnnnnnnnnnnnnnnnnnnnnnnnnnnnnnnnnnnnnnnnnnnnnnnnnnnnnnnnnnnnnnnnnnnnnnnnnnnnnnnnnnnnnnnnnnnnnnnnnnnnnnnnnnnnnnnnnnnnnnnnnnnnnnnnnnnnnnnnnnnnnnnnnnnnnnnnnnnnnnnnnnnnnnnnnnnnnnnnnnnnnnnnnnnnnnnnnnnnnnnnnnnnnnnnnnnnnnnnnnnnnnnnnnnnnnnnnnnnnnnnnnnnnnnnnnnnnnnnnnnnnnnnnnnnnnnnnnnnnnnnnnnnnnnnnnnnnnnnnnnnnnnnnnnnnnnnnnnnnnnnnnnnnnnnnnnnnnnnnnnnnnnnnnnnnnnnnnnnnnnnnnnnnnnnnnnnnnnnnnnnnnnnnnnnnnnnnnnnnnnnnnnnnnnnnnnnnnnnnnnnnnnnnnnnnnnnnnnnnnnnnnnnnnnnnnnnnnnnnnnnnnnnnnnnnnnnnnnnnnnnnnnnnnnnnnnnnnnnnnnnnnnnnnnnnnnnnnnnnnnnnnnnnnnnnnnnnnnnnnnnnnnnnnnnnnnnnnnnnnnnnnnnnnnnnnnnnnnnnnnnnnnnnnnnnnnnnnnnnnnnnnnnnnnnnnnnnnnnnnnnnnnnnnnnnnnnnnnnnnnnnnnnnnnnnnnnnnnnnnnnnnnnnnnnnnnnnnnnnnnnnnnnnnnnnnnnnnnnnnnnnnnnnnnnnnnnnnnnnnnnnnnnnnnnnnnnnnnnnnnnnnnnnnnnnnnnnnnnnnnnnnnnnnnnnnnnnnnnnnnnnnnnnnnnnnnnnnnnnnnnnnnnnnnnnnnnnnnnnnnnnnnnnnnnnnnnnnnnnnnnnnnnnnnnnnnnnnnnnnnnnnnnnnnnnnnnnnnnnnnnnnnnnnnnnnnnnnnnnnnnnnnnnnnnnnnnnnnnnnnnnnnnnnnnnnnnnnnnnnnnnnnnnnnnnnnnnnnnnnnnnnnnnnnnnnnnnnnnnnnnnnnnnnnnnnnnnnnnnnnnnnnnnnnnnnnnnnnnnnnnnnnnnnnnnnnnnnnnnnnnnnnnnnnnnnnnnnnnnnnnnnnnnnnnnnnnnnnnnnnnnnnnnnnnnnnnnnnnnnnnnnnnnnnnnnnnnnnnnnnnnnnnnnnnnnnnnnnnnnnnnnnnnnnnnnnnnnnnnnnnnnnnnnnnnnnnnnnnnnnnnnnnnnnnnnnnnnnnnnnnnnnnnnnnnnnnnnnnnnnnnnnnnnnnnnnnnnnnnnnnnnnnnnnnnnnnnnnnnnnnnnnnnnnnnnnnnnnnnnnnnnnnnnnnnnnnnnnnnnnnnnnnnnnnnnnnnnnnnnnnnnnnnnnnnnnnnnnnnnnnnnnnnnnnnnnnnnnnnnnnnnnnnnnnnnnnnnnnnnnnnnnnnnnnnnnnnnnnnnnnnnnnnnnnnnnnnnnnnnnnnnnnnnnnnnnnnnnnnnnnnnnnnnnnnnnnnnnnnnnnnnnnnnnnnnnnnnnnnnnnnnnnnnnnnnnnnnnnnnnnnnnnnnnnnnnnnnnnnnnnnnnnnnnnnnnnnnnnnnnnnnnnnnnnnnnnnnnnnnnnnnnnnnnnnnnnnnnnnnnnnnnnnnnnnnnnnnnnnnnnnnnnnnnnnnnnnnnnnnnnnnnnnnnnnnnnnnnnnnnnnnnnnnnnnnnnnnnnnnnnnnnnnnnnnnnnnnnnnnnnnnnnnnnnnnnnnnnnnnnnnnnnnnnnnnnnnnnnnnnnnnnnnnnnnnnnnnnnnnnnnnnnnnnnnnnnnnnnnnnnnnnnnnnnnnnnnnnnnnnnnnnnnnnnnnnnnnnnnnnnnnnnnnnnnnnnnnnnnnnnnnnnnnnnnnnnnnnnnnnnnnnnnnnnnnnnnnnnnnnnnnnnnnnnnnnnnnnnnnnnnnnnnnnnnnnnnnnnnnnnnnnnnnnnnnnnnnnnnnnnnnnnnnnnnnnnnnnnnnnnnnnnnnnnnnnnnnnnnnnnnnnnnnnnnnnnnnnnnnnnnnnnnnnnnnnnnnnnnnnnnnnnnnnnnnnnnnnnnnnnnnnnnnnnnnnnnnnnnnnnnnnnnnnnnnnnnnnnnnnnnnnnnnnnnnnnnnnnnnnnnnnnnnnnnnnnnnnnnnnnnnnnnnnnnnnnnnnnnnnnnnnnnnnnnnnnnnnnnnnnnnnnnnnnnnnnnnnnnnnnnnnnnnnnnnnnnnnnnnnnnnnnnnnnnnnnnnnnnnnnnnnnnnnnnnnnnnnnnnnnnnnnnnnnnnnnnnnnnnnnnnnnnnnnnnnnnnnnnnnnnnnnnnnnnnnnnnnnnnnnnnnnnnnnnnnnnnnnnnnnnnnnnnnnnnnnnnnnnnnnnnnnnnnnnnnnnnnnnnnnnnnnnnnnnnnnnnnnnnnnnnnnnnnnnnnnnnnnnnnnnnnnnnnnnnnnnnnnnnnnnnnnnnnnnnnnnnnnnnnnnnnnnnnnnnnnnnnnnnnnnnnnnnnnnnnnnnnnnnnnnnnnnnnnnnnnnnnnnnnnnnnnnnnnnnnnnnnnnnnnnnnnnnnnnnnnnnnnnnnnnnnnnnnnnnnnnnnnnnnnnnnnnnnnnnnnnnnnnnnnnnnnnnnnnnnnnnnnnnnnnnnnnnnnnnnnnnnnnnnnnnnnnnnnnnnnnnnnnnnnnnnnnnnnnnnnnnnnnnnnnnnnnnnnnnnnnnnnnnnnnnnnnnnnnnnnnnnnnnnnnnnnnnnnnnnnnnnnnnnnnnnnnnnnnnnnnnnnnnnnnnnnnnnnnnnnnnnnnnnnnnnnnnnnnnnnnnnnnnnnnnnnnnnnnnnnnnnnnnnnnnnnnnnnnnnnnnnnnnnnnnnnnnnnnnnnnnnnnnnnnnnnnnnnnnnnnnnnnnnnnnnnnnnnnnnnnnnnnnnnnnnnnnnnnnnnnnnnnnnnnnnnnnnnnnnnnnnnnnnnnnnnnnnnnnnnnnnnnnnnnnnnnnnnnnnnnnnnnnnnnnnnnnnnnnnnnnnnnnnnnnnnnnnnnnnnnnnnnnnnnnnnnnnnnnnnnnnnnnnnnnnnnnnnnnnnnnnnnnnnnnnnnnnnnnnnnnnnnnnnnnnnnnnnnnnnnnnnnnnnnnnnnnnnnnnnnnnnnnnnnnnnnnnnnnnnnnnnnnnnnnnnnnnnnnnnnnnnnnnnnnnnnnnnnnnnnnnnnnnnnnnnnnnnnnnnnnnnnnnnnnnnnnnnnnnnnnnnnnnnnnnnnnnnnnnnnnnnnnnnnnnnnnnnnnnnnnnnnnnnnnnnnnnnnnnnnnnnnnnnnnnnnnnnnnnnnnnnnnnnnnnnnnnnnnnnnnnnnnnnnnnnnnnnnnnnnnnnnnnnnnnnnnnnnnnnnnnnnnnnnnnnnnnnnnnnnnnnnnnnnnnnnnnnnnnnnnnnnnnnnnnnnnnnnnnnnnnnnnnnnnnnnnnnnnnnnnnnnnnnnnnnnnnnnnnnnnnnnnnnnnnnnnnnnnnnnnnnnnnnnnnnnnnnnnnnnnnnnnnnnnnnnnnnnnnnnnnnnnnnnnnnnnnnnnnnnnnnnnnnnnnnnnnnnnnnnnnnnnnnnnnnnnnnnnnnnnnnnnnnnnnnnnnnnnnnnnnnnnnnnnnnnnnnnnnnnnnnnnnnnnnnnnnnnnnnnnnnnnnnnnnnnnnnnnnnnnnnnnnnnnnnnnnnnnnnnnnnnnnnnnnnnnnnnnnnnnnnnnnnnnnnnnnnnnnnnnnnnnnnnnnnnnnnnnnnnnnnnnnnnnnnnnnnnnnnnnnnnnnnnnnnnnnnnnnnnnnnnnnnnnnnnnnnnnnnnnnnnnnnnnnnnnnnnnnnnnnnnnnnnnnnnnnnnnnnnnnnnnnnnnnnnnnnnnnnnnnnnnnnnnnnnnnnnnnnnnnnnnnnnnnnnnnnnnnnnnnnnnnnnnnnnnnnnnnnnnnnnnnnnnnnnnnnnnnnnnnnnnnnnnnnnnnnnnnnnnnnnnnnnnnnnnnnnnnnnnnnnnnnnnnnnnnnnnnnnnnnnnnnnnnnnnnnnnnnnnnnnnnnnnnnnnnnnnnnnnnnnnnnnnnnnnnnnnnnnnnnnnnnnnnnnnnnnnnnnnnnnnnnnnnnnnnnnnnnnnnnnnnnnnnnnnnnnnnnnnnnnnnnnnnnnnnnnnnnnnnnnnnnnnnnnnnnnnnnnnnnnnnnnnnnnnnnnnnnnnnnnnnnnnnnnnnnnnnnnnnnnnnnnnnnnnnnnnnnnnnnnnnnnnnnnnnnnnnnnnnnnnnnnnnnnnnnnnnnnnnnnnnnnnnnnnnnnnnnnnnnnnnnnnnnnnnnnnnnnnnnnnnnnnnnnnnnnnnnnnnnnnnnnnnnnnnnnnnnnnnnnnnnnnnnnnnnnnnnnnnnnnnnnnnnnnnnnnnnnnnnnnnnnnnnnnnnnnnnnnnnnnnnnnnnnnnnnnnnnnnnnnnnnnnnnnnnnnnnnnnnnnnnnnnnnnnnnnnnnnnnnnnnnnnnnnnnnnnnnnnnnnnnnnnnnnnnnnnnnnnnnnnnnnnnnnnnnnnnnnnnnnnnnnnnnnnnnnnnnnnnnnnnnnnnnnnnnnnnnnnnnnnnnnnnnnnnnnnnnnnnnnnnnnnnnnnnnnnnnnnnnnnnnnnnnnnnnnnnnnnnnnnnnnnnnnnnnnnnnnnnnnnnnnnnnnnnnnnnnnnnnnnnnnnnnnnnnnnnnnnnnnnnnnnnnnnnnnnnnnnnnnnnnnnnnnnnnnnnnnnnnnnnnnnnnnnnnnnnnnnnnnnnnnnnnnnnnnnnnnnnnnnnnnnnnnnnnnnnnnnnnnnnnnnnnnnnnnnnnnnnnnnnnnnnnnnnnnnnnnnnnnnnnnnnnnnnnnnnnnnnnnnnnnnnnnnnnnnnnnnnnnnnnnnnnnnnnnnnnnnnnnnnnnnnnnnnnnnnnnnnnnnnnnnnnnnnnnnnnnnnnnnnnnnnnnnnnnnnnnnnnnnnnnnnnnnnnnnnnnnnnnnnnnnnnnnnnnnnnnnnnnnnnnnnnnnnnnnnnnnnnnnnnnnnnnnnnnnnnnnnnnnnnnnnnnnnnnnnnnnnnnnnnnnnnnnnnnnnnnnnnnnnnnnnnnnnnnnnnnnnnnnnnnnnnnnnnnnnnnnnnnnnnnnnnnnnnnnnnnnnnnnnnnnnnnnnnnnnnnnnnnnnnnnnnnnnnnnnnnnnnnnnnnnnnnnnnnnnnnnnnnnnnnnnnnnnnnnnnnnnnnnnnnnnnnnnnnnnnnnnnnnnnnnnnnnnnnnnnnnnnnnnnnnnnnnnnnnnnnnnnnnnnnnnnnnnnnnnnnnnnnnnnnnnnnnnnnnnnnnnnnnnnnnnnnnnnnnnnnnnnnnnnnnnnnnnnnnnnnnnnnnnnnnnnnnnnnnnnnnnnnnnnnnnnnnnnnnnnnnnnnnnnnnnnnnnnnnnnnnnnnnnnnnnnnnnnnnnnnnnnnnnnnnnnnnnnnnnnnnnnnnnnnnnnnnnnnnnnnnnnnnnnnnnnnnnnnnnnnnnnnnnnnnnnnnnnnnnnnnnnnnnnnnnnnnnnnnnnnnnnnnnnnnnnnnnnnnnnnnnnnnnnnnnnnnnnnnnnnnnnnnnnnnnnnnnnnnnnnnnnnnnnnnnnnnnnnnnnnnnnnnnnnnnnnnnnnnnnnnnnnnnnnnnnnnnnnnnnnnnnnnnnnnnnnnnnnnnnnnnnnnnnnnnnnnnnnnnnnnnnnnnnnnnnnnnnnnnnnnnnnnnnnnnnnnnnnnnnnnnnnnnnnnnnnnnnnnnnnnnnnnnnnnnnnnnnnnnnnnnnnnnnnnnnnnnnnnnnnnnnnnnnnnnnnnnnnnnnnnnnnnnnnnnnnnnnnnnnnnnnnnnnnnnnnnnnnnnnnnnnnnnnnnnnnnnnnnnnnnnnnnnnnnnnnnnnnnnnnnnnnnnnnnnnnnnnnnnnnnnnnnnnnnnnnnnnnnnnnnnnnnnnnnnnnnnnnnnnnnnnnnnnnnnnnnnnnnnnnnnnnnnnnnnnnnnnnnnnnnnnnnnnnnnnnnnnnnnnnnnnnnnnnnnnnnnnnnnnnnnnnnnnnnnnnnnnnnnnnnnnnnnnnnnnnnnnnnnnnnnnnnnnnnnnnnnnnnnnnnnnnnnnnnnnnnnnnnnnnnnnnnnnnnnnnnnnnnnnnnnnnnnnnnnnnnnnnnnnnnnnnnnnnnnnnnnnnnnnnnnnnnnnnnnnnnnnnnnnnnnnnnnnnnnnnnnnnnnnnnnnnnnnnnnnnnnnnnnnnnnnnnnnnnnnnnnnnnnnnnnnnnnnnnnnnnnnnnnnnnnnnnnnnnnnnnnnnnnnnnnnnnnnnnnnnnnnnnnnnnnnnnnnnnnnnnnnnnnnnnnnnnnnnnnnnnnnnnnnnnnnnnnnnnnnnnnnnnnnnnnnnnnnnnnnnnnnnnnnnnnnnnnnnnnnnnnnnnnnnnnnnnnnnnnnnnnnnnnnnnnnnnnnnnnnnnnnnnnnnnnnnnnnnnnnnnnnnnnnnnnnnnnnnnnnnnnnnnnnnnnnnnnnnnnnnnnnnnnnnnnnnnnnnnnnnnnnnnnnnnnnnnnnnnnnnnnnnnnnnnnnnnnnnnnnnnnnnnnnnnnnnnnnnnnnnnnnnnnnnnnnnnnnnnnnnnnnnnnnnnnnnnnnnnnnnnnnnnnnnnnnnnnnnnnnnnnnnnnnnnnnnnnnnnnnnnnnnnnnnnnnnnnnnnnnnnnnnnnnnnnnnnnnnnnnnnnnnnnnnnnnnnnnnnnnnnnnnnnnnnnnnnnnnnnnnnnnnnnnnnnnnnnnnnnnnnnnnnnnnnnnnnnnnnnnnnnnnnnnnnnnnnnnnnnnnnnnnnnnnnnnnnnnnnnnnnnnnnnnnnnnnnnnnnnnnnnnnnnnnnnnnnnnnnnnnnnnnnnnnnnnnnnnnnnnnnnnnnnnnnnnnnnnnnnnnnnnnnnnnnnnnnnnnnnnnnnnnnnnnnnnnnnnnnnnnnnnnnnnnnnnnnnnnnnnnnnnnnnnnnnnnnnnnnnnnnnnnnnnnnnnnnnnnnnnnnnnnnnnnnnnnnnnnnnnnnnnnnnnnnnnnnnnnnnnnnnnnnnnnnnnnnnnnnnnnnnnnnnnnnnnnnnnnnnnnnnnnnnnnnnnnnnnnnnnnnnnnnnnnnnnnnnnnnnnnnnnnnnnnnnnnnnnnnnnnnnnnnnnnnnnnnnnnnnnnnnnnnnnnnnnnnnnnnnnnnnnnnnnnnnnnnnnnnnnnnnnnnnnnnnnnnnnnnnnnnnnnnnnnnnnnnnnnnnnnnnnnnnnnnnnnnnnnnnnnnnnnnnnnnnnnnnnnnnnnnnnnnnnnnnnnnnnnnnnnnnnnnnnnnnnnnnnnnnnnnnnnnnnnnnnnnnnnnnnnnnnnnnnnnnnnnnnnnnnnnnnnnnnnnnnnnnnnnnnnnnnnnnnnnnnnnnnnnnnnnnnnnnnnnnnnnnnnnnnnnnnnnnnnnnnnnnnnnnnnnnnnnnnnnnnnnnnnnnnnnnnnnnnnnnnnnnnnnnnnnnnnnnnnnnnnnnnnnnnnnnnnnnnnnnnnnnnnnnnnnnnnnnnnnnnnnnnnnnnnnnnnnnnnnnnnnnnnnnnnnnnnnnnnnnnnnnnnnnnnnnnnnnnnnnnnnnnnnnnnnnnnnnnnnnnnnnnnnnnnnnnnnnnnnnnnnnnnnnnnnnnnnnnnnnnnnnnnnnnnnnnnnnnnnnnnnnnnnnnnnnnnnnnnnnnnnnnnnnnnnnnnnnnnnnnnnnnnnnnnnnnnnnnnnnnnnnnnnnnnnnnnnnnnnnnnnnnnnnnnnnnnnnnnnnnnnnnnnnnnnnnnnnnnnnnnnnnnnnnnnnnnnnnnnnnnnnnnnnnnnnnnnnnnnnnnnnnnnnnnnnnnnnnnnnnnnnnnnnnnnnnnnnnnnnnnnnnnnnnnnnnnnnnnnnnnnnnnnnnnnnnnnnnnnnnnnnnnnnnnnnnnnnnnnnnnnnnnnnnnnnnnnnnnnnnnnnnnnnnnnnnnnnnnnnnnnnnnnnnnnnnnnnnnnnnnnnnnnnnnnnnnnnnnnnnnnnnnnnnnnnnnnnnnnnnnnnnnnnnnnnnnnnnnnnnnnnnnnnnnnnnnnnnnnnnnnnnnnnnnnnnnnnnnnnnnnnnnnnnnnnnnnnnnnnnnnnnnnnnnnnnnnnnnnnnnnnnnnnnnnnnnnnnnnnnnnnnnnnnnnnnnnnnnnnnnnnnnnnnnnnnnnnnnnnnnnnnnnnnnnnnnnnnnnnnnnnnnnnnnnnnnnnnnnnnnnnnnnnnnnnnnnnnnnnnnnnnnnnnnnnnnnnnnnnnnnnnnnnnnnnnnnnnnnnnnnnnnnnnnnnnnnnnnnnnnnnnnnnnnnnnnnnnnnnnnnnnnnnnnnnnnnnnnnnnnnnnnnnnnnnnnnnnnnnnnnnnnnnnnnnnnnnnnnnnnnnnnnnnnnnnnnnnnnnnnnnnnnnnnnnnnnnnnnnnnnnnnnnnnnnnnnnnnnnnnnnnnnnnnnnnnnnnnnnnnnnnnnnnnnnnnnnnnnnnnnnnnnnnnnnnnnnnnnnnnnnnnnnnnnnnnnnnnnnnnnnnnnnnnnnnnnnnnnnnnnnnnnnnnnnnnnnnnnnnnnnnnnnnnnnnnnnnnnnnnnnnnnnnnnnnnnnnnnnnnnnnnnnnnnnnnnnnnnnnnnnnnnnnnnnnnnnnnnnnnnnnnnnnnnnnnnnnnnnnnnnnnnnnnnnnnnnnnnnnnnnnnnnnnnnnnnnnnnnnnnnnnnnnnnnnnnnnnnnnnnnnnnnnnnnnnnnnnnnnnnnnnnnnnnnnnnnnnnnnnnnnnnnnnnnnnnnnnnnnnnnnnnnnnnnnnnnnnnnnnnnnnnnnnnnnnnnnnnnnnnnnnnnnnnnnnnnnnnnnnnnnnnnnnnnnnnnnnnnnnnnnnnnnnnnnnnnnnnnnnnnnnnnnnnnnnnnnnnnnnnnnnnnnnnnnnnnnnnnnnnnnnnnnnnnnnnnnnnnnnnnnnnnnnnnnnnnnnnnnnnnnnnnnnnnnnnnnnnnnnnnnnnnnnnnnnnnnnnnnnnnnnnnnnnnnnnnnnnnnnnnnnnnnnnnnnnnnnnnnnnnnnnnnnnnnnnnnnnnnnnnnnnnnnnnnnnnnnnnnnnnnnnnnnnnnnnnnnnnnnnnnnnnnnnnnnnnnnnnnnnnnnnnnnnnnnnnnnnnnnnnnnnnnnnnnnnnnnnnnnnnnnnnnnnnnnnnnnnnnnnnnnnnnnnnnnnnnnnnnnnnnnnnnnnnnnnnnnnnnnnnnnnnnnnnnnnnnnnnnnnnnnnnnnnnnnnnnnnnnnnnnnnnnnnnnnnnnnnnnnnnnnnnnnnnnnnnnnnnnnnnnnnnnnnnnnnnnnnnnnnnnnnnnnnnnnnnnnnnnnnnnnnnnnnnnnnnnnnnnnnnnnnnnnnnnnnnnnnnnnnnnnnnnnnnnnnnnnnnnnnnnnnnnnnnnnnnnnnnnnnnnnnnnnnnnnnnnnnnnnnnnnnnnnnnnnnnnnnnnnnnnnnnnnnnnnnnnnnnnnnnnnnnnnnnnnnnnnnnnnnnnnnnnnnnnnnnnnnnnnnnnnnnnnnnnnnnnnnnnnnnnnnnnnnnnnnnnnnnnnnnnnnnnnnnnnnnnnnnnnnnnnnnnnnnnnnnnnnnnnnnnnnnnnnnnnnnnnnnnnnnnnnnnnnnnnnnnnnnnnnnnnnnnnnnnnnnnnnnnnnnnnnnnnnnnnnnnnnnnnnnnnnnnnnnnnnnnnnnnnnnnnnnnnnnnnnnnnnnnnnnnnnnnnnnnnnnnnnnnnnnnnnnnnnnnnnnnnnnnnnnnnnnnnnnnnnnnnnnnnnnnnnnnnnnnnnnnnnnnnnnnnnnnnnnnnnnnnnnnnnnnnnnnnnnnnnnnnnnnnnnnnnnnnnnnnnnnnnnnnnnnnnnnnnnnnnnnnnnnnnnnnnnnnnnnnnnnnnnnnnnnnnnnnnnnnnnnnnnnnnnnnnnnnnnnnnnnnnnnnnnnnnnnnnnnnnnnnnnnnnnnnnnnnnnnnnnnnnnnnnnnnnnnnnnnnnnnnnnnnnnnnnnnnnnnnnnnnnnnnnnnnnnnnnnnnnnnnnnnnnnnnnnnnnnnnnnnnnnnnnnnnnnnnnnnnnnnnnnnnnnnnnnnnnnnnnnnnnnnnnnnnnnnnnnnnnnnnnnnnnnnnnnnnnnnnnnnnnnnnnnnnnnnnnnnnnnnnnnnnnnnnnnnnnnnnnnnnnnnnnnnnnnnnnnnnnnnnnnnnnnnnnnnnnnnnnnnnnnnnnnnnnnnnnnnnnnnnnnnnnnnnnnnnnnnnnnnnnnnnnnnnnnnnnnnnnnnnnnnnnnnnnnnnnnnnnnnnnnnnnnnnnnnnnnnnnnnnnnnnnnnnnnnnnnnnnnnnnnnnnnnnnnnnnnnnnnnnnnnnnnnnnnnnnnnnnnnnnnnnnnnnnnnnnnnnnnnnnnnnnnnnnnnnnnnnnnnnnnnnnnnnnnnnnnnnnnnnnnnnnnnnnnnnnnnnnnnnnnnnnnnnnnnnnnnnnnnnnnnnnnnnnnnnnnnnnnnnnnnnnnnnnnnnnnnnnnnnnnnnnnnnnnnnnnnnnnnnnnnnnnnnnnnnnnnnnnnnnnnnnnnnnnnnnnnnnnnnnnnnnnnnnnnnnnnnnnnnnnnnnnnnnnnnnnnnnnnnnnnnnnnnnnnnnnnnnnnnnnnnnnnnnnnnnnnnnnnnnnnnnnnnnnnnnnnnnnnnnnnnnnnnnnnnnnnnnnnnnnnnnnnnnnnnnnnnnnnnnnnnnnnnnnnnnnnnnnnnnnnnnnnnnnnnnnnnnnnnnnnnnnnnnnnnnnnnnnnnnnnnnnnnnnnnnnnnnnnnnnnnnnnnnnnnnnnnnnnnnnnnnnnnnnnnnnnnnnnnnnnnnnnnnnnnnnnnnnnnnnnnnnnnnnnnnnnnnnnnnnnnnnnnnnnnnnnnnnnnnnnnnnnnnnnnnnnnnnnnnnnnnnnnnnnnnnnnnnnnnnnnnnnnnnnnnnnnnnnnnnnnnnnnnnnnnnnnnnnnnnnnnnnnnnnnnnnnnnnnnnnnnnnnnnnnnnnnnnnnnnnnnnnnnnnnnnnnnnnnnnnnnnnnnnnnnnnnnnnnnnnnnnnnnnnnnnnnnnnnnnnnnnnnnnnnnnnnnnnnnnnnnnnnnnnnnnnnnnnnnnnnnnnnnnnnnnnnnnnnnnnnnnnnnnnnnnnnnnnnnnnnnnnnnnnnnnnnnnnnnnnnnnnnnnnnnnnnnnnnnnnnnnnnnnnnnnnnnnnnnnnnnnnnnnnnnnnnnnnnnnnnnnnnnnnnnnnnnnnnnnnnnnnnnnnnnnnnnnnnnnnnnnnnnnnnnnnnnnnnnnnnnnnnnnnnnnnnnnnnnnnnnnnnnnnnnnnnnnnnnnnnnnnnnnnnnnnnnnnnnnnnnnnnnnnnnnnnnnnnnnnnnnnnnnnnnnnnnnnnnnnnnnnnnnnnnnnnnnnnnnnnnnnnnnnnnnnnnnnnnnnnnnnnnnnnnnnnnnnnnnnnnnnnnnnnnnnnnnnnnnnnnnnnnnnnnnnnnnnnnnnnnnnnnnnnnnnnnnnnnnnnnnnnnnnnnnnnnnnnnnnnnnnnnnnnnnnnnnnnnnnnnnnnnnnnnnnnnnnnnnnnnnnnnnnnnnnnnnnnnnnnnnnnnnnnnnnnnnnnnnnnnnnnnnnnnnnnnnnnnnnnnnnnnnnnnnnnnnnnnnnnnnnnnnnnnnnnnnnnnnnnnnnnnnnnnnnnnnnnnnnnnnnnnnnnnnnnnnnnnnnnnnnnnnnnnnnnnnnnnnnnnnnnnnnnnnnnnnnnnnnnnnnnnnnnnnnnnnnnnnnnnnnnnnnnnnnnnnnnnnnnnnnnnnnnnnnnnnnnnnnnnnnnnnnnnnnnnnnnnnnnnnnnnnnnnnnnnnnnnnnnnnnnnnnnnnnnnnnnnnnnnnnnnnnnnnnnnnnnnnnnnnnnnnnnnnnnnnnnnnnnnnnnnnnnnnnnnnnnnnnnnnnnnnnnnnnnnnnnnnnnnnnnnnnnnnnnnnnnnnnnnnnnnnnnnnnnnnnnnnnnnnnnnnnnnnnnnnnnnnnnnnnnnnnnnnnnnnnnnnnnnnnnnnnnnnnnnnnnnnnnnnnnnnnnnnnnnnnnnnnnnnnnnnnnnnnnnnnnnnnnnnnnnnnnnnnnnnnnnnnnnnnnnnnnnnnnnnnnnnnnnnnnnnnnnnnnnnnnnnnnnnnnnnnnnnnnnnnnnnnnnnnnnnnnnnnnnnnnnnnnnnnnnnnnnnnnnnnnnnnnnnnnnnnnnnnnnnnnnnnnnnnnnnnnnnnnnnnnnnnnnnnnnnnnnnnnnnnnnnnnnnnnnnnnnnnnnnnnnnnnnnnnnnnnnnnnnnnnnnnnnnnnnnnnnnnnnnnnnnnnnnnnnnnnnnnnnnnnnnnnnnnnnnnnnnnnnnnnnnnnnnnnnnnnnnnnnnnnnnnnnnnnnnnnnnnnnnnnnnnnnnnnnnnnnnnnnnnnnnnnnnnnnnnnnnnnnnnnnnnnnnnnnnnnnnnnnnnnnnnnnnnnnnnnnnnnnnnnnnnnnnnnnnnnnnnnnnnnnnnnnnnnnnnnnnnnnnnnnnnnnnnnnnnnnnnnnnnnnnnnnnnnnnnnnnnnnnnnnnnnnnnnnnnnnnnnnnnnnnnnnnnnnnnnnnnnnnnnnnnnnnnnnnnnnnnnnnnnnnnnnnnnnnnnnnnnnnnnnnnnnnnnnnnnnnnnnnnnnnnnnnnnnnnnnnnnnnnnnnnnnnnnnnnnnnnnnnnnnnnnnnnnnnnnnnnnnnnnnnnnnnnnnnnnnnnnnnnnnnnnnnnnnnnnnnnnnnnnnnnnnnnnnnnnnnnnnnnnnnnnnnnnnnnnnnnnnnnnnnnnnnnnnnnnnnnnnnnnnnnnnnnnnnnnnnnnnnnnnnnnnnnnnnnnnnnnnnnnnnnnnnnnnnnnnnnnnnnnnnnnnnnnnnnnnnnnnnnnnnnnnnnnnnnnnnnnnnnnnnnnnnnnnnnnnnnnnnnnnnnnnnnnnnnnnnnnnnnnnnnnnnnnnnnnnnnnnnnnnnnnnnnnnnnnnnnnnnnnnnnnnnnnnnnnnnnnnnnnnnnnnnnnnnnnnnnnnnnnnnnnnnnnnnnnnnnnnnnnnnnnnnnnnnnnnnnnnnnnnnnnnnnnnnnnnnnnnnnnnnnnnnnnnnnnnnnnnnnnnnnnnnnnnnnnnnnnnnnnnnnnnnnnnnnnnnnnnnnnnnnnnnnnnnnnnnnnnnnnnnnnnnnnnnnnnnnnnnnnnnnnnnnnnnnnnnnnnnnnnnnnnnnnnnnnnnnnnnnnnnnnnnnnnnnnnnnnnnnnnnnnnnnnnnnnnnnnnnnnnnnnnnnnnnnnnnnnnnnnnnnnnnnnnnnnnnnnnnnnnnnnnnnnnnnnnnnnnnnnnnnnnnnnnnnnnnnnnnnnnnnnnnnnnnnnnnnnnnnnnnnnnnnnnnnnnnnnnnnnnnnnnnnnnnnnnnnnnnnnnnnnnnnnnnnnnnnnnnnnnnnnnnnnnnnnnnnnnnnnnnnnnnnnnnnnnnnnnnnnnnnnnnnnnnnnnnnnnnnnnnnnnnnnnnnnnnnnnnnnnnnnnnnnnnnnnnnnnnnnnnnnnnnnnnnnnnnnnnnnnnnnnnnnnnnnnnnnnnnnnnnnnnnnnnnnnnnnnnnnnnnnnnnnnnnnnnnnnnnnnnnnnnnnnnnnnnnnnnnnnnnnnnnnnnnnnnnnnnnnnnnnnnnnnnnnnnnnnnnnnnnnnnnnnnnnnnnnnnnnnnnnnnnnnnnnnnnnnnnnnnnnnnnnnnnnnnnnnnnnnnnnnnnnnnnnnnnnnnnnnnnnnnnnnnnnnnnnnnnnnnnnnnnnnnnnnnnnnnnnnnnnnnnnnnnnnnnnnnnnnnnnnnnnnnnnnnnnnnnnnnnnnnnnnnnnnnnnnnnnnnnnnnnnnnnnnnnnnnnnnnnnnnnnnnnnnnnnnnnnnnnnnnnnnnnnnnnnnnnnnnnnnnnnnnnnnnnnnnnnnnnnnnnnnnnnnnnnnnnnnnnnnnnnnnnnnnnnnnnnnnnnnnnnnnnnnnnnnnnnnnnnnnnnnnnnnnnnnnnnnnnnnnnnnnnnnnnnnnnnnnnnnnnnnnnnnnnnnnnnnnnnnnnnnnnnnnnnnnnnnnnnnnnnnnnnnnnnnnnnnnnnnnnnnnnnnnnnnnnnnnnnnnnnnnnnnnnnnnnnnnnnnnnnnnnnnnnnnnnnnnnnnnnnnnnnnnnnnnnnnnnnnnnnnnnnnnnnnnnnnnnnnnnnnnnnnnnnnnnnnnnnnnnnnnnnnnnnnnnnnnnnnnnnnnnnnnnnnnnnnnnnnnnnnnnnnnnnnnnnnnnnnnnnnnnnnnnnnnnnnnnnnnnnnnnnnnnnnnnnnnnnnnnnnnnnnnnnnnnnnnnnnnnnnnnnnnnnnnnnnnnnnnnnnnnnnnnnnnnnnnnnnnnnnnnnnnnnnnnnnnnnnnnnnnnnnnnnnnnnnnnnnnnnnnnnnnnnnnnnnnnnnnnnnnnnnnnnnnnnnnnnnnnnnnnnnnnnnnnnnnnnnnnnnnnnnnnnnnnnnnnnnnnnnnnnnnnnnnnnnnnnnnnnnnnnnnnnnnnnnnnnnnnnnnnnnnnnnnnnnnnnnnnnnnnnnnnnnnnnnnnnnnnnnnnnnnnnnnnnnnnnnnnnnnnnnnnnnnnnnnnnnnnnnnnnnnnnnnnnnnnnnnnnnnnnnnnnnnnnnnnnnnnnnnnnnnnnnnnnnnnnnnnnnnnnnnnnnnnnnnnnnnnnnnnnnnnnnnnnnnnnnnnnnnnnnnnnnnnnnnnnnnnnnnnnnnnnnnnnnnnnnnnnnnnnnnnnnnnnnnnnnnnnnnnnnnnnnnnnnnnnnnnnnnnnnnnnnnnnnnnnnnnnnnnnnnnnnnnnnnnnnnnnnnnnnnnnnnnnnnnnnnnnnnnnnnnnnnnnnnnnnnnnnnnnnnnnnnnnnnnnnnnnnnnnnnnnnnnnnnnnnnnnnnnnnnnnnnnnnnnnnnnnnnnnnnnnnnnnnnnnnnnnnnnnnnnnnnnnnnnnnnnnnnnnnnnnnnnnnnnnnnnnnnnnnnnnnnnnnnnnnnnnnnnnnnnnnnnnnnnnnnnnnnnnnnnnnnnnnnnnnnnnnnnnnnnnnnnnnnnnnnnnnnnnnnnnnnnnnnnnnnnnnnnnnnnnnnnnnnnnnnnnnnnnnnnnnnnnnnnnnnnnnnnnnnnnnnnnnnnnnnnnnnnnnnnnnnnnnnnnnnnnnnnnnnnnnnnnnnnnnnnnnnnnnnnnnnnnnnnnnnnnnnnnnnnnnnnnnnnnnnnnnnnnnnnnnnnnnnnnnnnnnnnnnnnnnnnnnnnnnnnnnnnnnnnnnnnnnnnnnnnnnnnnnnnnnnnnnnnnnnnnnnnnnnnnnnnnnnnnnnnnnnnnnnnnnnnnnnnnnnnnnnnnnnnnnnnnnnnnnnnnnnnnnnnnnnnnnnnnnnnnnnnnnnnnnnnnnnnnnnnnnnnnnnnnnnnnnnnnnnnnnnnnnnnnnnnnnnnnnnnnnnnnnnnnnnnnnnnnnnnnnnnnnnnnnnnnnnnnnnnnnnnnnnnnnnnnnnnnnnnnnnnnnnnnnnnnnnnnnnnnnnnnnnnnnnnnnnnnnnnnnnnnnnnnnnnnnnnnnnnnnnnnnnnnnnnnnnnnnnnnnnnnnnnnnnnnnnnnnnnnnnnnnnnnnnnnnnnnnnnnnnnnnnnnnnnnnnnnnnnnnnnnnnnnnnnnnnnnnnnnnnnnnnnnnnnnnnnnnnnnnnnnnnnnnnnnnnnnnnnnnnnnnnnnnnnnnnnnnnnnnnnnnnnnnnnnnnnnnnnnnnnnnnnnnnnnnnnnnnnnnnnnnnnnnnnnnnnnnnnnnnnnnnnnnnnnnnnnnnnnnnnnnnnnnnnnnnnnnnnnnnnnnnnnnnnnnnnnnnnnnnnnnnnnnnnnnnnnnnnnnnnnnnnnnnnnnnnnnnnnnnnnnnnnnnnnnnnnnnnnnnnnnnnnnnnnnnnnnnnnnnnnnnnnnnnnnnnnnnnnnnnnnnnnnnnnnnnnnnnnnnnnnnnnnnnnnnnnnnnnnnnnnnnnnnnnnnnnnnnnnnnnnnnnnnnnnnnnnnnnnnnnnnnnnnnnnnnnnnnnnnnnnnnnnnnnnnnnnnnnnnnnnnnnnnnnnnnnnnnnnnnnnnnnnnnnnnnnnnnnnnnnnnnnnnnnnnnnnnnnnnnnnnnnnnnnnnnnnnnnnnnnnnnnnnnnnnnnnnnnnnnnnnnnnnnnnnnnnnnnnnnnnnnnnnnnnnnnnnnnnnnnnnnnnnnnnnnnnnnnnnnnnnnnnnnnnnnnnnnnnnnnnnnnnnnnnnnnnnnnnnnnnnnnnnnnnnnnnnnnnnnnnnnnnnnnnnnnnnnnnnnnnnnnnnnnnnnnnnnnnnnnnnnnnnnnnnnnnnnnnnnnnnnnnnnnnnnnnnnnnnnnnnnnnnnnnnnnnnnnnnnnnnnnnnnnnnnnnnnnnnnnnnnnnnnnnnnnnnnnnnnnnnnnnnnnnnnnnnnnnnnnnnnnnnnnnnnnnnnnnnnnnnnnnnnnnnnnnnnnnnnnnnnnnnnnnnnnnnnnnnnnnnnnnnnnnnnnnnnnnnnnnnnnnnnnnnnnnnnnnnnnnnnnnnnnnnnnnnnnnnnnnnnnnnnnnnnnnnnnnnnnnnnnnnnnnnnnnnnnnnnnnnnnnnnnnnnnnnnnnnnnnnnnnnnnnnnnnnnnnnnnnnnnnnnnnnnnnnnnnnnnnnnnnnnnnnnnnnnnnnnnnnnnnnnnnnnnnnnnnnnnnnnnnnnnnnnnnnnnnnnnnnnnnnnnnnnnnnnnnnnnnnnnnnnnnnnnnnnnnnnnnnnnnnnnnnnnnnnnnnnnnnnnnnnnnnnnnnnnnnnnnnnnnnnnnnnnnnnnnnnnnnnnnnnnnnnnnnnnnnnnnnnnnnnnnnnnnnnnnnnnnnnnnnnnnnnnnnnnnnnnnnnnnnnnnnnnnnnnnnnnnnnnnnnnnnnnnnnnnnnnnnnnnnnnnnnnnnnnnnnnnnnnnnnnnnnnnnnnnnnnnnnnnnnnnnnnnnnnnnnnnnnnnnnnnnnnnnnnnnnnnnnnnnnnnnnnnnnnnnnnnnnnnnnnnnnnnnnnnnnnnnnnnnnnnnnnnnnnnnnnnnnnnnnnnnnnnnnnnnnnnnnnnnnnnnnnnnnnnnnnnnnnnnnnnnnnnnnnnnnnnnnnnnnnnnnnnnnnnnnnnnnnnnnnnnnnnnnnnnnnnnnnnnnnnnnnnnnnnnnnnnnnnnnnnnnnnnnnnnnnnnnnnnnnnnnnnnnnnnnnnnnnnnnnnnnnnnnnnnnnnnnnnnnnnnnnnnnnnnnnnnnnnnnnnnnnnnnnnnnnnnnnnnnnnnnnnnnnnnnnnnnnnnnnnnnnnnnnnnnnnnnnnnnnnnnnnnnnnnnnnnnnnnnnnnnnnnnnnnnnnnnnnnnnnnnnnnnnnnnnnnnnnnnnnnnnnnnnnnnnnnnnnnnnnnnnnnnnnnnnnnnnnnnnnnnnnnnnnnnnnnnnnnnnnnnnnnnnnnnnnnnnnnnnnnnnnnnnnnnnnnnnnnnnnnnnnnnnnnnnnnnnnnnnnnnnnnnnnnnnnnnnnnnnnnnnnnnnnnnnnnnnnnnnnnnnnnnnnnnnnnnnnnnnnnnnnnnnnnnnnnnnnnnnnnnnnnnnnnnnnnnnnnnnnnnnnnnnnnnnnnnnnnnnnnnnnnnnnnnnnnnnnnnnnnnnnnnnnnnnnnnnnnnnnnnnnnnnnnnnnnnnnnnnnnnnnnnnnnnnnnnnnnnnnnnnnnnnnnnnnnnnnnnnnnnnnnnnnnnnnnnnnnnnnnnnnnnnnnnnnnnnnnnnnnnnnnnnnnnnnnnnnnnnnnnnnnnnnnnnnnnnnnnnnnnnnnnnnnnnnnnnnnnnnnnnnnnnnnnnnnnnnnnnnnnnnnnnnnnnnnnnnnnnnnnnnnnnnnnnnnnnnnnnnnnnnnnnnnnnnnnnnnnnnnnnnnnnnnnnnnnnnnnnnnnnnnnnnnnnnnnnnnnnnnnnnnnnnnnnnnnnnnnnnnnnnnnnnnnnnnnnnnnnnnnnnnnnnnnnnnnnnnnnnnnnnnnnnnnnnnnnnnnnnnnnnnnnnnnnnnnnnnnnnnnnnnnnnnnnnnnnnnnnnnnnnnnnnnnnnnnnnnnnnnnnnnnnnnnnnnnnnnnnnnnnnnnnnnnnnnnnnnnnnnnnnnnnnnnnnnnnnnnnnnnnnnnnnnnnnnnnnnnnnnnnnnnnnnnnnnnnnnnnnnnnnnnnnnnnnnnnnnnnnnnnnnnnnnnnnnnnnnnnnnnnnnnnnnnnnnnnnnnnnnnnnnnnnnnnnnnnnnnnnnnnnnnnnnnnnnnnnnnnnnnnnnnnnnnnnnnnnnnnnnnnnnnnnnnnnnnnnnnnnnnnnnnnnnnnnnnnnnnnnnnnnnnnnnnnnnnnnnnnnnnnnnnnnnnnnnnnnnnnnnnnnnnnnnnnnnnnnnnnnnnnnnnnnnnnnnnnnnnnnnnnnnnnnnnnnnnnnnnnnnnnnnnnnnnnnnnnnnnnnnnnnnnnnnnnnnnnnnnnnnnnnnnnnnnnnnnnnnnnnnnnnnnnnnnnnnnnnnnnnnnnnnnnnnnnnnnnnnnnnnnnnnnnnnnnnnnnnnnnnnnnnnnnnnnnnnnnnnnnnnnnnnnnnnnnnnnnnnnnnnnnnnnnnnnnnnnnnnnnnnnnnnnnnnnnnnnnnnnnnnnnnnnnnnnnnnnnnnnnnnnnnnnnnnnnnnnnnnnnnnnnnnnnnnnnnnnnnnnnnnnnnnnnnnnnnnnnnnnnnnnnnnnnnnnnnnnnnnnnnnnnnnnnnnnnnnnnnnnnnnnnnnnnnnnnnnnnnnnnnnnnnnnnnnnnnnnnnnnnnnnnnnnnnnnnnnnnnnnnnnnnnnnnnnnnnnnnnnnnnnnnnnnnnnnnnnnnnnnnnnnnnnnnnnnnnnnnnnnnnnnnnnnnnnnnnnnnnnnnnnnnnnnnnnnnnnnnnnnnnnnnnnnnnnnnnnnnnnnnnnnnnnnnnnnnnnnnnnnnnnnnnnnnnnnnnnnnnnnnnnnnnnnnnnnnnnnnnnnnnnnnnnnnnnnnnnnnnnnnnnnnnnnnnnnnnnnnnnnnnnnnnnnnnnnnnnnnnnnnnnnnnnnnnnnnnnnnnnnnnnnnnnnnnnnnnnnnnnnnnnnnnnnnnnnnnnnnnnnnnnnnnnnnnnnnnnnttcccgagataaatgccggtgacggctggccggagctggacctcttccatgcaagatacctttatgaggcgcgggaagagagggagaaacgcaccctgatacgtttcgggaaaccgggtggtcaagttgaatatggagaggggaatatccaagaagggaagcggctccaccgagcggtgctggtcgccacccaagtgattgaacagagcctggacctggattttgacctgatggttactgaaatggcccccatcgacttgattttgcagcgggctggccgactgcagcgccgtggccaagactgcggcatacggtttatatcggtttaaaaggaaaagagaggagaaagccgtgaactataacctgctcgaagagaagtggctccctgttctatggaaaaatgggaacaccaatcgtgtgggcattattgaggccctcacgcaagccggccggattcgtcaaatcgcggccagcaatcccatggaccgcgtggccatcctgcgtttcctgctggcgttgctgtattggtgccagggaaacccaccggacaagattccagacgacgccttccccccggattggttcgagaagctgcatgaccataaaaacagcttcgaccttctgggggatggcaagcggttctatcaggatcatactgcaaaacgcacgcgagcgattacggatttgattcaagagatccctgcgggcaacaacttctggcacttcaggcattccacagataagaaaaacgggctctgccctgcttgctgttctatggggttgttgcggttgccgctcttctccgtgagtggcctaagcggcccgggagagcctaatctgatggccgggatcaatggcgttcctccggtgtatgttgtgccttgggggaagttgctgtttagtacgctcttggcgaattgggcgacatgcacgaatatcggcgaaccttcatgggtgaagcccggcatcagccaaattcaagatgaggatgttcctctgctaactggcctgacgctactgcctaggcgagtcttgctgcatgatccggtcaaagaaccggccatgtgcatcagttgtggccagaaaacagcggttattttgacctgcgagtttcagacggccggcaaaaaggagaatgaaaagtggaacgatccccatgtgatctatttggacggcaaaacacgaaaaaccttgagggcaccagatttaacttcggcaggcaagttcagaatggaccgcccatggtccgatctgcttgcccgtatagtggaaacaggtaaatctactcctctacttgtcatcggttttgcgacgaacaaggcaaagaacgttgatgtgtgggagcgaattattgatatgtcatcaacaggatcaatctcagaaacggcggcaccttcgataaagcaatggcaggaaaaggcaaaagagatggagaaggagataggaagatcgaaggtcgagggacctgcctttatcgccgctatccgccctcatgtcgaagccagggtctccgcgcaagcgggcgaattgattaccggaggtgaagatgcctgtgaccaggcagcccgcgaatatagtccgatgatgaccgccatcgccaaatcgctttctccgggttatacgactgctgcggtggaaagacagaaacagattgccgacgttaaaccgaacctgggaccgagttccaaggcgtcaaaaagtccgacaggaagaagggaggggaaaagtgactgcaaccgaacagtacattgaatacctgacgcgtatgaaatccggagaactcgggttgctgcgccagcacgcgggtcagggtctcgatgaaacggtggacggcttcgacctgttcgcgggctgctggtggccgctgcgggcgaaaagtgagcgcacaccccggcgcgaagtggcctggctgatagctaaactatacgccttccgtccaattccaccatcgcccggcgagatgctcgcccgccagcttgcacgatgccaaccgaacaaggatccagccaaaaagcgtttcacgcaaagtttcgacagggtgctgactaaaccgcttggcaagatggaacctcacctgcgctgggcgctgggtctgctcgccacaagaaacctgaaactcgactgggcacgactgacggatgatctttccatctgggaacgcgaatccacgcggctcaaatgggcgaaccaatttttaagaacctacggaggatgacacccatgttaatcgagattcacgccattcaaaaccacagcccggccaacctcaaccgggatgacctgggcgcgcccaagacctgctatttcggcggggtgctgcgctcgcgcctttccagtcagtgccttaagcggagtatccgcctgagcgctgagtttaagcagttgctcggcggggtccgcacccggcggttggcgcaattgattgccggagatggtccggcgtcgtttaagaaggcaatgacggtattggagatttgtgggattgcaccaaaagaaaagagaaaaaagaaaagcgaggatgacgaccttatcggggaagataaaagtgctggactggtatatgtgagcaacgaagcggtggataagatgtctaaacttttggaaacgggtagatctgataatgatatggcaaaggaatttgccaaaatcatcgctaagcatatcatcgcaccggatatggccctctgcggcaggatgctggaaccgaaaaaaggtgataatgacgtgtggaaaggacttgataagaccattgaggcggctcttcaggtggcccacgccatatcgactcacgaggcccgccccgaagtcgattattatgtcgccgccgatgatatccccggcgaagatgccggcgccggctatgtggatgaagcaatgttcgcctcggcctgtttctacaagtacttctccatcaattgggaaaccctggtcaaaaatcttcacaacaatgagaaactggccgcacataccgtcggggcgttcatacgaggagccgccttggccaaccccaccggcaagcaaaacagcttcgcggcgcacaatcctcccgatggcatcttggtggagatcagggaaaacagccccatcagctacgccaacgcctttgccaggccggtgagtcaaggcgagagagatatcatatcgcagagtatcgcccaacttggccaatatgttcacgacctggacaccggatacggcaaacctaagaaccggttctggttctcgcccaatctttgctatcccttgagctttggggaaggcaagaaggaattcgccctggccggaaagaacctcaaatcgttggaagaattgatccccgcagtgatcagggaacttggtcatgagtggcaggaggtccagaaggtggtggtaaagccggaggtagcctgatgagcgccaacaccctgtttctccgcctggaaggccctctccaggcctggggcgatcagcaatcgaaattcgtcgtccggcggacggctgaggctccgacgaaatccggtgtgatcgggatgctgggcgcggccttgggagtttcccgtccagaggctattgataagtggcttcccaaactctgcgccttgcgcctgggcgtgcgcctggaccggcccggggtgcgctggtgggattatcatacggtcggcgccggcatgcagatgcgcattgccgaaggggaagggaagtccaaacccggcgccatgctcaccaggcgcgagtatctctgcgatgcctctttcctggtggccctgcagggcgaaccgggcctgattgcccaactggaggccgctatcaaagcgccccattggactctttacctgggcagaaagtcctgcccgccgtcccgcccgttgctcttaagccatcagggagacggggcgcatccggccggcgatttcccggatttgctttctgctctgcaagcggttccctggcgtcggcggctcaagagagatcagtcgccgccaaccgtggattgcctgctcgattgggaaccgacgtctgaacagcccgaagcccccgatgaggccctcatctggtacgatgtgcccgtttcctttgagcccccggcccatctgccgcgcttcgtcctgcgccgggaattaaaagtgggcgccgacggagggctagaacttgccaaagagccggcgcagaatcacaccccggcgccgccgcgcccgcgggcaaattatcgccacacggaataccggaagaaacggcaggagaggctggaccacgaccatcatctgtgcctcttttgcaagtccccggccaccaccgtgcaacatgtcacctaccggcgggccggggggcatgaagacctggacgatttgcgttccttatgccgcctctgccacgatgccgtgaccatgctcgaatatggcctgggcatgggcctggaccgcatcaatcccgaagagccgcgctggcgcgacctgatcatccggaagcgggacgagatcatccgattccgctcgcttcagacccgccgccggcgtctggccgcggaggaggtggaatagagctatgtacctgtcctccctcttgatcgacgtgggtgacaaccctgatcgcccccggccggggcgcttgtggctgcgcaacctctatcatgtccatcagcgcctgtgcatggcgtttccgtccgattcccgaatatccgaagaccccgacttcctcaaacctttcaagccggaggaatttggcatcaaccaggttcatgtaacccgccaggcggattccggcttcctcttccgcgtcgatcccctccccggcggccgggccatgattctcgttcaatgcgccgcatggcccgattgggattacgcctttcacaatgccagttttttggcggcctgcgaggtgaagacatacgaaccttgtttcgtaaagggacagtctcttcgcttccgcctcctggcgaatccgacaaagaaagtcgagacgataaagaaaaaagaccggcagaattacaccaaagaggagcttaaggaaataaaagggcgccacggcaggcgccttccggtaccatgcgcgaccgagatcaaagaatggcgcctcaagaatcccggcaaagatgctcgcatttttatagactcccaacttttccactggctcgcttaccagggtgaaaagaaggggttctctgtcaaggaagaatccatcacaattcagccgggctatatctatgtgcataaaaaaaagagccaggacgataaaggccagcgcctgcgcactgtccgttacgacggtattctccaagtcaccgatgcggatcgtattcaggatactgttattcggggaatcggccccgggaaagcctatgggctgggccttctctccctatctccgccgtgaggatggttatgagattgaaagaccttcattttctgcccaaatttcgggactgcctgagctatctctacgtggagcactgccgcattgagcaggaaagccgggccattgcgttctgggacgctaagggcaaggtgccggtcccctgcgccagcctggggctcctcatgctcggtccggggacctccatcacccatgccgcggtaactaccctggcggataacggctgcctggtgctgtggtgcggcgaggaaggcgtccgcctctatgcccagggcatgggcctgaccagaaacgcggctaatctcctgcaccaggccaggttgtgggccgatgccgactccaggctgcaggtggtcctgcggctttatcgcctgcgctttgaggagcccctggacgagaccctgactctcccccagatccggggcaaagaaggagtgcgggtcaggcaggcctatgcccgggccagccgggaaaccggggttccctggcacgggcgggcctaccggcgggacgcctggcacgcggccgatccggtgaaccgggccctgtccgcggccaatagctgtctctatggtatttgccacgccgccatcctggccctgggcctttctcctgccctgggcttcatccataccggcaaaatgctttcttttgtctatgacgtggccgatctctataaaacccagatctccatccccgccgcgtttcaggaggcggccccaggcctcgagagcttggaaagccgggtccgtcaacggtgccgggacgctttcaagcaaaccctgttcctgaaaaggatcatttatgatcttcaggccgtcctgggcctggatggccggggacggagccgggagctggaaaagtttcaccgggatgaggcccgccccggagaactctgggacccggacgcgagcggcggcgtcgccggcgggcaaaatttcgctcccgatgatgaaggaggcgagtaaatcatggtggtctttattttggaaaaggtgcccccgggtttgaggggggagctcaccaggtggctgcttgaagccaaggccggggtcttcgtcggcaagatctccgctctggtgcgcgaccttctctgggataaggtgtgccgggaatcccggggcggcgccagcctgctggtccacgcggccgagcgggagcagggtttcgccatccgcatgtggggagaaccctcccggcaggtggaagacttcgagggccttttgctgatccgggtcccgcaatgatgcgggtttggtcagtgttgtccccacgcacgtgggggtgaaccgtagtccttgccgaaggggtcggtgcccgtgttgttgtccccacgcacgtgggggtgaaccggtttggaattaggtcggtgatttcgacaaggtgttgtccccacgcacgtgggggtgaaccgtttgtcgggactttataagcatcatccacttcgttgtccccacgcacgtgggggtgaaccgataaagtcgaactcgtagaccagatttttttcgttgtccccacgcacgtgggggtgaaccgcagagtctggagctgattgaggccctaaaacagttgtccccacgcacgtgggggtgaaccgaatgatcacaaggatcgaagaccaaatcgtgagttgtccccacgcacgtgggggtgaaccgttatcccttctgtctgggtgatcccttgctcggttgtccccacgcacgtgggggtgaaccgtggaacggcgggccaagcggacggtggccagcgttgtccccacgcacgtgggggtgaaccgaagagc

SEQ ID NO: 1115 - DNA, 103195 bp, Artificial Sequence
  Synthetic Oligonucleotide
  misc_feature (1)..(96115): n is a, c, g, or t
nnnnnnnnnnnnnnnnnnnnnnnnnnnnnnnnnnnnnnnnnnnnnnnnnnnnnnnnnnnnnnnnnnnnnnnnnnnnnnnnnnnnnnnnnnnnnnnnnnnnnnnnnnnnnnnnnnnnnnnnnnnnnnnnnnnnnnnnnnnnnnnnnnnnnnnnnnnnnnnnnnnnnnnnnnnnnnnnnnnnnnnnnnnnnnnnnnnnnnnnnnnnnnnnnnnnnnnnnnnnnnnnnnnnnnnnnnnnnnnnnnnnnnnnnnnnnnnnnnnnnnnnnnnnnnnnnnnnnnnnnnnnnnnnnnnnnnnnnnnnnnnnnnnnnnnnnnnnnnnnnnnnnnnnnnnnnnnnnnnnnnnnnnnnnnnnnnnnnnnnnnnnnnnnnnnnnnnnnnnnnnnnnnnnnnnnnnnnnnnnnnnnnnnnnnnnnnnnnnnnnnnnnnnnnnnnnnnnnnnnnnnnnnnnnnnnnnnnnnnnnnnnnnnnnnnnnnnnnnnnnnnnnnnnnnnnnnnnnnnnnnnnnnnnnnnnnnnnnnnnnnnnnnnnnnnnnnnnnnnnnnnnnnnnnnnnnnnnnnnnnnnnnnnnnnnnnnnnnnnnnnnnnnnnnnnnnnnnnnnnnnnnnnnnnnnnnnnnnnnnnnnnnnnnnnnnnnnnnnnnnnnnnnnnnnnnnnnnnnnnnnnnnnnnnnnnnnnnnnnnnnnnnnnnnnnnnnnnnnnnnnnnnnnnnnnnnnnnnnnnnnnnnnnnnnnnnnnnnnnnnnnnnnnnnnnnnnnnnnnnnnnnnnnnnnnnnnnnnnnnnnnnnnnnnnnnnnnnnnnnnnnnnnnnnnnnnnnnnnnnnnnnnnnnnnnnnnnnnnnnnnnnnnnnnnnnnnnnnnnnnnnnnnnnnnnnnnnnnnnnnnnnnnnnnnnnnnnnnnnnnnnnnnnnnnnnnnnnnnnnnnnnnnnnnnnnnnnnnnnnnnnnnnnnnnnnnnnnnnnnnnnnnnnnnnnnnnnnnnnnnnnnnnnnnnnnnnnnnnnnnnnnnnnnnnnnnnnnnnnnnnnnnnnnnnnnnnnnnnnnnnnnnnnnnnnnnnnnnnnnnnnnnnnnnnnnnnnnnnnnnnnnnnnnnnnnnnnnnnnnnnnnnnnnnnnnnnnnnnnnnnnnnnnnnnnnnnnnnnnnnnnnnnnnnnnnnnnnnnnnnnnnnnnnnnnnnnnnnnnnnnnnnnnnnnnnnnnnnnnnnnnnnnnnnnnnnnnnnnnnnnnnnnnnnnnnnnnnnnnnnnnnnnnnnnnnnnnnnnnnnnnnnnnnnnnnnnnnnnnnnnnnnnnnnnnnnnnnnnnnnnnnnnnnnnnnnnnnnnnnnnnnnnnnnnnnnnnnnnnnnnnnnnnnnnnnnnnnnnnnnnnnnnnnnnnnnnnnnnnnnnnnnnnnnnnnnnnnnnnnnnnnnnnnnnnnnnnnnnnnnnnnnnnnnnnnnnnnnnnnnnnnnnnnnnnnnnnnnnnnnnnnnnnnnnnnnnnnnnnnnnnnnnnnnnnnnnnnnnnnnnnnnnnnnnnnnnnnnnnnnnnnnnnnnnnnnnnnnnnnnnnnnnnnnnnnnnnnnnnnnnnnnnnnnnnnnnnnnnnnnnnnnnnnnnnnnnnnnnnnnnnnnnnnnnnnnnnnnnnnnnnnnnnnnnnnnnnnnnnnnnnnnnnnnnnnnnnnnnnnnnnnnnnnnnnnnnnnnnnnnnnnnnnnnnnnnnnnnnnnnnnnnnnnnnnnnnnnnnnnnnnnnnnnnnnnnnnnnnnnnnnnnnnnnnnnnnnnnnnnnnnnnnnnnnnnnnnnnnnnnnnnnnnnnnnnnnnnnnnnnnnnnnnnnnnnnnnnnnnnnnnnnnnnnnnnnnnnnnnnnnnnnnnnnnnnnnnnnnnnnnnnnnnnnnnnnnnnnnnnnnnnnnnnnnnnnnnnnnnnnnnnnnnnnnnnnnnnnnnnnnnnnnnnnnnnnnnnnnnnnnnnnnnnnnnnnnnnnnnnnnnnnnnnnnnnnnnnnnnnnnnnnnnnnnnnnnnnnnnnnnnnnnnnnnnnnnnnnnnnnnnnnnnnnnnnnnnnnnnnnnnnnnnnnnnnnnnnnnnnnnnnnnnnnnnnnnnnnnnnnnnnnnnnnnnnnnnnnnnnnnnnnnnnnnnnnnnnnnnnnnnnnnnnnnnnnnnnnnnnnnnnnnnnnnnnnnnnnnnnnnnnnnnnnnnnnnnnnnnnnnnnnnnnnnnnnnnnnnnnnnnnnnnnnnnnnnnnnnnnnnnnnnnnnnnnnnnnnnnnnnnnnnnnnnnnnnnnnnnnnnnnnnnnnnnnnnnnnnnnnnnnnnnnnnnnnnnnnnnnnnnnnnnnnnnnnnnnnnnnnnnnnnnnnnnnnnnnnnnnnnnnnnnnnnnnnnnnnnnnnnnnnnnnnnnnnnnnnnnnnnnnnnnnnnnnnnnnnnnnnnnnnnnnnnnnnnnnnnnnnnnnnnnnnnnnnnnnnnnnnnnnnnnnnnnnnnnnnnnnnnnnnnnnnnnnnnnnnnnnnnnnnnnnnnnnnnnnnnnnnnnnnnnnnnnnnnnnnnnnnnnnnnnnnnnnnnnnnnnnnnnnnnnnnnnnnnnnnnnnnnnnnnnnnnnnnnnnnnnnnnnnnnnnnnnnnnnnnnnnnnnnnnnnnnnnnnnnnnnnnnnnnnnnnnnnnnnnnnnnnnnnnnnnnnnnnnnnnnnnnnnnnnnnnnnnnnnnnnnnnnnnnnnnnnnnnnnnnnnnnnnnnnnnnnnnnnnnnnnnnnnnnnnnnnnnnnnnnnnnnnnnnnnnnnnnnnnnnnnnnnnnnnnnnnnnnnnnnnnnnnnnnnnnnnnnnnnnnnnnnnnnnnnnnnnnnnnnnnnnnnnnnnnnnnnnnnnnnnnnnnnnnnnnnnnnnnnnnnnnnnnnnnnnnnnnnnnnnnnnnnnnnnnnnnnnnnnnnnnnnnnnnnnnnnnnnnnnnnnnnnnnnnnnnnnnnnnnnnnnnnnnnnnnnnnnnnnnnnnnnnnnnnnnnnnnnnnnnnnnnnnnnnnnnnnnnnnnnnnnnnnnnnnnnnnnnnnnnnnnnnnnnnnnnnnnnnnnnnnnnnnnnnnnnnnnnnnnnnnnnnnnnnnnnnnnnnnnnnnnnnnnnnnnnnnnnnnnnnnnnnnnnnnnnnnnnnnnnnnnnnnnnnnnnnnnnnnnnnnnnnnnnnnnnnnnnnnnnnnnnnnnnnnnnnnnnnnnnnnnnnnnnnnnnnnnnnnnnnnnnnnnnnnnnnnnnnnnnnnnnnnnnnnnnnnnnnnnnnnnnnnnnnnnnnnnnnnnnnnnnnnnnnnnnnnnnnnnnnnnnnnnnnnnnnnnnnnnnnnnnnnnnnnnnnnnnnnnnnnnnnnnnnnnnnnnnnnnnnnnnnnnnnnnnnnnnnnnnnnnnnnnnnnnnnnnnnnnnnnnnnnnnnnnnnnnnnnnnnnnnnnnnnnnnnnnnnnnnnnnnnnnnnnnnnnnnnnnnnnnnnnnnnnnnnnnnnnnnnnnnnnnnnnnnnnnnnnnnnnnnnnnnnnnnnnnnnnnnnnnnnnnnnnnnnnnnnnnnnnnnnnnnnnnnnnnnnnnnnnnnnnnnnnnnnnnnnnnnnnnnnnnnnnnnnnnnnnnnnnnnnnnnnnnnnnnnnnnnnnnnnnnnnnnnnnnnnnnnnnnnnnnnnnnnnnnnnnnnnnnnnnnnnnnnnnnnnnnnnnnnnnnnnnnnnnnnnnnnnnnnnnnnnnnnnnnnnnnnnnnnnnnnnnnnnnnnnnnnnnnnnnnnnnnnnnnnnnnnnnnnnnnnnnnnnnnnnnnnnnnnnnnnnnnnnnnnnnnnnnnnnnnnnnnnnnnnnnnnnnnnnnnnnnnnnnnnnnnnnnnnnnnnnnnnnnnnnnnnnnnnnnnnnnnnnnnnnnnnnnnnnnnnnnnnnnnnnnnnnnnnnnnnnnnnnnnnnnnnnnnnnnnnnnnnnnnnnnnnnnnnnnnnnnnnnnnnnnnnnnnnnnnnnnnnnnnnnnnnnnnnnnnnnnnnnnnnnnnnnnnnnnnnnnnnnnnnnnnnnnnnnnnnnnnnnnnnnnnnnnnnnnnnnnnnnnnnnnnnnnnnnnnnnnnnnnnnnnnnnnnnnnnnnnnnnnnnnnnnnnnnnnnnnnnnnnnnnnnnnnnnnnnnnnnnnnnnnnnnnnnnnnnnnnnnnnnnnnnnnnnnnnnnnnnnnnnnnnnnnnnnnnnnnnnnnnnnnnnnnnnnnnnnnnnnnnnnnnnnnnnnnnnnnnnnnnnnnnnnnnnnnnnnnnnnnnnnnnnnnnnnnnnnnnnnnnnnnnnnnnnnnnnnnnnnnnnnnnnnnnnnnnnnnnnnnnnnnnnnnnnnnnnnnnnnnnnnnnnnnnnnnnnnnnnnnnnnnnnnnnnnnnnnnnnnnnnnnnnnnnnnnnnnnnnnnnnnnnnnnnnnnnnnnnnnnnnnnnnnnnnnnnnnnnnnnnnnnnnnnnnnnnnnnnnnnnnnnnnnnnnnnnnnnnnnnnnnnnnnnnnnnnnnnnnnnnnnnnnnnnnnnnnnnnnnnnnnnnnnnnnnnnnnnnnnnnnnnnnnnnnnnnnnnnnnnnnnnnnnnnnnnnnnnnnnnnnnnnnnnnnnnnnnnnnnnnnnnnnnnnnnnnnnnnnnnnnnnnnnnnnnnnnnnnnnnnnnnnnnnnnnnnnnnnnnnnnnnnnnnnnnnnnnnnnnnnnnnnnnnnnnnnnnnnnnnnnnnnnnnnnnnnnnnnnnnnnnnnnnnnnnnnnnnnnnnnnnnnnnnnnnnnnnnnnnnnnnnnnnnnnnnnnnnnnnnnnnnnnnnnnnnnnnnnnnnnnnnnnnnnnnnnnnnnnnnnnnnnnnnnnnnnnnnnnnnnnnnnnnnnnnnnnnnnnnnnnnnnnnnnnnnnnnnnnnnnnnnnnnnnnnnnnnnnnnnnnnnnnnnnnnnnnnnnnnnnnnnnnnnnnnnnnnnnnnnnnnnnnnnnnnnnnnnnnnnnnnnnnnnnnnnnnnnnnnnnnnnnnnnnnnnnnnnnnnnnnnnnnnnnnnnnnnnnnnnnnnnnnnnnnnnnnnnnnnnnnnnnnnnnnnnnnnnnnnnnnnnnnnnnnnnnnnnnnnnnnnnnnnnnnnnnnnnnnnnnnnnnnnnnnnnnnnnnnnnnnnnnnnnnnnnnnnnnnnnnnnnnnnnnnnnnnnnnnnnnnnnnnnnnnnnnnnnnnnnnnnnnnnnnnnnnnnnnnnnnnnnnnnnnnnnnnnnnnnnnnnnnnnnnnnnnnnnnnnnnnnnnnnnnnnnnnnnnnnnnnnnnnnnnnnnnnnnnnnnnnnnnnnnnnnnnnnnnnnnnnnnnnnnnnnnnnnnnnnnnnnnnnnnnnnnnnnnnnnnnnnnnnnnnnnnnnnnnnnnnnnnnnnnnnnnnnnnnnnnnnnnnnnnnnnnnnnnnnnnnnnnnnnnnnnnnnnnnnnnnnnnnnnnnnnnnnnnnnnnnnnnnnnnnnnnnnnnnnnnnnnnnnnnnnnnnnnnnnnnnnnnnnnnnnnnnnnnnnnnnnnnnnnnnnnnnnnnnnnnnnnnnnnnnnnnnnnnnnnnnnnnnnnnnnnnnnnnnnnnnnnnnnnnnnnnnnnnnnnnnnnnnnnnnnnnnnnnnnnnnnnnnnnnnnnnnnnnnnnnnnnnnnnnnnnnnnnnnnnnnnnnnnnnnnnnnnnnnnnnnnnnnnnnnnnnnnnnnnnnnnnnnnnnnnnnnnnnnnnnnnnnnnnnnnnnnnnnnnnnnnnnnnnnnnnnnnnnnnnnnnnnnnnnnnnnnnnnnnnnnnnnnnnnnnnnnnnnnnnnnnnnnnnnnnnnnnnnnnnnnnnnnnnnnnnnnnnnnnnnnnnnnnnnnnnnnnnnnnnnnnnnnnnnnnnnnnnnnnnnnnnnnnnnnnnnnnnnnnnnnnnnnnnnnnnnnnnnnnnnnnnnnnnnnnnnnnnnnnnnnnnnnnnnnnnnnnnnnnnnnnnnnnnnnnnnnnnnnnnnnnnnnnnnnnnnnnnnnnnnnnnnnnnnnnnnnnnnnnnnnnnnnnnnnnnnnnnnnnnnnnnnnnnnnnnnnnnnnnnnnnnnnnnnnnnnnnnnnnnnnnnnnnnnnnnnnnnnnnnnnnnnnnnnnnnnnnnnnnnnnnnnnnnnnnnnnnnnnnnnnnnnnnnnnnnnnnnnnnnnnnnnnnnnnnnnnnnnnnnnnnnnnnnnnnnnnnnnnnnnnnnnnnnnnnnnnnnnnnnnnnnnnnnnnnnnnnnnnnnnnnnnnnnnnnnnnnnnnnnnnnnnnnnnnnnnnnnnnnnnnnnnnnnnnnnnnnnnnnnnnnnnnnnnnnnnnnnnnnnnnnnnnnnnnnnnnnnnnnnnnnnnnnnnnnnnnnnnnnnnnnnnnnnnnnnnnnnnnnnnnnnnnnnnnnnnnnnnnnnnnnnnnnnnnnnnnnnnnnnnnnnnnnnnnnnnnnnnnnnnnnnnnnnnnnnnnnnnnnnnnnnnnnnnnnnnnnnnnnnnnnnnnnnnnnnnnnnnnnnnnnnnnnnnnnnnnnnnnnnnnnnnnnnnnnnnnnnnnnnnnnnnnnnnnnnnnnnnnnnnnnnnnnnnnnnnnnnnnnnnnnnnnnnnnnnnnnnnnnnnnnnnnnnnnnnnnnnnnnnnnnnnnnnnnnnnnnnnnnnnnnnnnnnnnnnnnnnnnnnnnnnnnnnnnnnnnnnnnnnnnnnnnnnnnnnnnnnnnnnnnnnnnnnnnnnnnnnnnnnnnnnnnnnnnnnnnnnnnnnnnnnnnnnnnnnnnnnnnnnnnnnnnnnnnnnnnnnnnnnnnnnnnnnnnnnnnnnnnnnnnnnnnnnnnnnnnnnnnnnnnnnnnnnnnnnnnnnnnnnnnnnnnnnnnnnnnnnnnnnnnnnnnnnnnnnnnnnnnnnnnnnnnnnnnnnnnnnnnnnnnnnnnnnnnnnnnnnnnnnnnnnnnnnnnnnnnnnnnnnnnnnnnnnnnnnnnnnnnnnnnnnnnnnnnnnnnnnnnnnnnnnnnnnnnnnnnnnnnnnnnnnnnnnnnnnnnnnnnnnnnnnnnnnnnnnnnnnnnnnnnnnnnnnnnnnnnnnnnnnnnnnnnnnnnnnnnnnnnnnnnnnnnnnnnnnnnnnnnnnnnnnnnnnnnnnnnnnnnnnnnnnnnnnnnnnnnnnnnnnnnnnnnnnnnnnnnnnnnnnnnnnnnnnnnnnnnnnnnnnnnnnnnnnnnnnnnnnnnnnnnnnnnnnnnnnnnnnnnnnnnnnnnnnnnnnnnnnnnnnnnnnnnnnnnnnnnnnnnnnnnnnnnnnnnnnnnnnnnnnnnnnnnnnnnnnnnnnnnnnnnnnnnnnnnnnnnnnnnnnnnnnnnnnnnnnnnnnnnnnnnnnnnnnnnnnnnnnnnnnnnnnnnnnnnnnnnnnnnnnnnnnnnnnnnnnnnnnnnnnnnnnnnnnnnnnnnnnnnnnnnnnnnnnnnnnnnnnnnnnnnnnnnnnnnnnnnnnnnnnnnnnnnnnnnnnnnnnnnnnnnnnnnnnnnnnnnnnnnnnnnnnnnnnnnnnnnnnnnnnnnnnnnnnnnnnnnnnnnnnnnnnnnnnnnnnnnnnnnnnnnnnnnnnnnnnnnnnnnnnnnnnnnnnnnnnnnnnnnnnnnnnnnnnnnnnnnnnnnnnnnnnnnnnnnnnnnnnnnnnnnnnnnnnnnnnnnnnnnnnnnnnnnnnnnnnnnnnnnnnnnnnnnnnnnnnnnnnnnnnnnnnnnnnnnnnnnnnnnnnnnnnnnnnnnnnnnnnnnnnnnnnnnnnnnnnnnnnnnnnnnnnnnnnnnnnnnnnnnnnnnnnnnnnnnnnnnnnnnnnnnnnnnnnnnnnnnnnnnnnnnnnnnnnnnnnnnnnnnnnnnnnnnnnnnnnnnnnnnnnnnnnnnnnnnnnnnnnnnnnnnnnnnnnnnnnnnnnnnnnnnnnnnnnnnnnnnnnnnnnnnnnnnnnnnnnnnnnnnnnnnnnnnnnnnnnnnnnnnnnnnnnnnnnnnnnnnnnnnnnnnnnnnnnnnnnnnnnnnnnnnnnnnnnnnnnnnnnnnnnnnnnnnnnnnnnnnnnnnnnnnnnnnnnnnnnnnnnnnnnnnnnnnnnnnnnnnnnnnnnnnnnnnnnnnnnnnnnnnnnnnnnnnnnnnnnnnnnnnnnnnnnnnnnnnnnnnnnnnnnnnnnnnnnnnnnnnnnnnnnnnnnnnnnnnnnnnnnnnnnnnnnnnnnnnnnnnnnnnnnnnnnnnnnnnnnnnnnnnnnnnnnnnnnnnnnnnnnnnnnnnnnnnnnnnnnnnnnnnnnnnnnnnnnnnnnnnnnnnnnnnnnnnnnnnnnnnnnnnnnnnnnnnnnnnnnnnnnnnnnnnnnnnnnnnnnnnnnnnnnnnnnnnnnnnnnnnnnnnnnnnnnnnnnnnnnnnnnnnnnnnnnnnnnnnnnnnnnnnnnnnnnnnnnnnnnnnnnnnnnnnnnnnnnnnnnnnnnnnnnnnnnnnnnnnnnnnnnnnnnnnnnnnnnnnnnnnnnnnnnnnnnnnnnnnnnnnnnnnnnnnnnnnnnnnnnnnnnnnnnnnnnnnnnnnnnnnnnnnnnnnnnnnnnnnnnnnnnnnnnnnnnnnnnnnnnnnnnnnnnnnnnnnnnnnnnnnnnnnnnnnnnnnnnnnnnnnnnnnnnnnnnnnnnnnnnnnnnnnnnnnnnnnnnnnnnnnnnnnnnnnnnnnnnnnnnnnnnnnnnnnnnnnnnnnnnnnnnnnnnnnnnnnnnnnnnnnnnnnnnnnnnnnnnnnnnnnnnnnnnnnnnnnnnnnnnnnnnnnnnnnnnnnnnnnnnnnnnnnnnnnnnnnnnnnnnnnnnnnnnnnnnnnnnnnnnnnnnnnnnnnnnnnnnnnnnnnnnnnnnnnnnnnnnnnnnnnnnnnnnnnnnnnnnnnnnnnnnnnnnnnnnnnnnnnnnnnnnnnnnnnnnnnnnnnnnnnnnnnnnnnnnnnnnnnnnnnnnnnnnnnnnnnnnnnnnnnnnnnnnnnnnnnnnnnnnnnnnnnnnnnnnnnnnnnnnnnnnnnnnnnnnnnnnnnnnnnnnnnnnnnnnnnnnnnnnnnnnnnnnnnnnnnnnnnnnnnnnnnnnnnnnnnnnnnnnnnnnnnnnnnnnnnnnnnnnnnnnnnnnnnnnnnnnnnnnnnnnnnnnnnnnnnnnnnnnnnnnnnnnnnnnnnnnnnnnnnnnnnnnnnnnnnnnnnnnnnnnnnnnnnnnnnnnnnnnnnnnnnnnnnnnnnnnnnnnnnnnnnnnnnnnnnnnnnnnnnnnnnnnnnnnnnnnnnnnnnnnnnnnnnnnnnnnnnnnnnnnnnnnnnnnnnnnnnnnnnnnnnnnnnnnnnnnnnnnnnnnnnnnnnnnnnnnnnnnnnnnnnnnnnnnnnnnnnnnnnnnnnnnnnnnnnnnnnnnnnnnnnnnnnnnnnnnnnnnnnnnnnnnnnnnnnnnnnnnnnnnnnnnnnnnnnnnnnnnnnnnnnnnnnnnnnnnnnnnnnnnnnnnnnnnnnnnnnnnnnnnnnnnnnnnnnnnnnnnnnnnnnnnnnnnnnnnnnnnnnnnnnnnnnnnnnnnnnnnnnnnnnnnnnnnnnnnnnnnnnnnnnnnnnnnnnnnnnnnnnnnnnnnnnnnnnnnnnnnnnnnnnnnnnnnnnnnnnnnnnnnnnnnnnnnnnnnnnnnnnnnnnnnnnnnnnnnnnnnnnnnnnnnnnnnnnnnnnnnnnnnnnnnnnnnnnnnnnnnnnnnnnnnnnnnnnnnnnnnnnnnnnnnnnnnnnnnnnnnnnnnnnnnnnnnnnnnnnnnnnnnnnnnnnnnnnnnnnnnnnnnnnnnnnnnnnnnnnnnnnnnnnnnnnnnnnnnnnnnnnnnnnnnnnnnnnnnnnnnnnnnnnnnnnnnnnnnnnnnnnnnnnnnnnnnnnnnnnnnnnnnnnnnnnnnnnnnnnnnnnnnnnnnnnnnnnnnnnnnnnnnnnnnnnnnnnnnnnnnnnnnnnnnnnnnnnnnnnnnnnnnnnnnnnnnnnnnnnnnnnnnnnnnnnnnnnnnnnnnnnnnnnnnnnnnnnnnnnnnnnnnnnnnnnnnnnnnnnnnnnnnnnnnnnnnnnnnnnnnnnnnnnnnnnnnnnnnnnnnnnnnnnnnnnnnnnnnnnnnnnnnnnnnnnnnnnnnnnnnnnnnnnnnnnnnnnnnnnnnnnnnnnnnnnnnnnnnnnnnnnnnnnnnnnnnnnnnnnnnnnnnnnnnnnnnnnnnnnnnnnnnnnnnnnnnnnnnnnnnnnnnnnnnnnnnnnnnnnnnnnnnnnnnnnnnnnnnnnnnnnnnnnnnnnnnnnnnnnnnnnnnnnnnnnnnnnnnnnnnnnnnnnnnnnnnnnnnnnnnnnnnnnnnnnnnnnnnnnnnnnnnnnnnnnnnnnnnnnnnnnnnnnnnnnnnnnnnnnnnnnnnnnnnnnnnnnnnnnnnnnnnnnnnnnnnnnnnnnnnnnnnnnnnnnnnnnnnnnnnnnnnnnnnnnnnnnnnnnnnnnnnnnnnnnnnnnnnnnnnnnnnnnnnnnnnnnnnnnnnnnnnnnnnnnnnnnnnnnnnnnnnnnnnnnnnnnnnnnnnnnnnnnnnnnnnnnnnnnnnnnnnnnnnnnnnnnnnnnnnnnnnnnnnnnnnnnnnnnnnnnnnnnnnnnnnnnnnnnnnnnnnnnnnnnnnnnnnnnnnnnnnnnnnnnnnnnnnnnnnnnnnnnnnnnnnnnnnnnnnnnnnnnnnnnnnnnnnnnnnnnnnnnnnnnnnnnnnnnnnnnnnnnnnnnnnnnnnnnnnnnnnnnnnnnnnnnnnnnnnnnnnnnnnnnnnnnnnnnnnnnnnnnnnnnnnnnnnnnnnnnnnnnnnnnnnnnnnnnnnnnnnnnnnnnnnnnnnnnnnnnnnnnnnnnnnnnnnnnnnnnnnnnnnnnnnnnnnnnnnnnnnnnnnnnnnnnnnnnnnnnnnnnnnnnnnnnnnnnnnnnnnnnnnnnnnnnnnnnnnnnnnnnnnnnnnnnnnnnnnnnnnnnnnnnnnnnnnnnnnnnnnnnnnnnnnnnnnnnnnnnnnnnnnnnnnnnnnnnnnnnnnnnnnnnnnnnnnnnnnnnnnnnnnnnnnnnnnnnnnnnnnnnnnnnnnnnnnnnnnnnnnnnnnnnnnnnnnnnnnnnnnnnnnnnnnnnnnnnnnnnnnnnnnnnnnnnnnnnnnnnnnnnnnnnnnnnnnnnnnnnnnnnnnnnnnnnnnnnnnnnnnnnnnnnnnnnnnnnnnnnnnnnnnnnnnnnnnnnnnnnnnnnnnnnnnnnnnnnnnnnnnnnnnnnnnnnnnnnnnnnnnnnnnnnnnnnnnnnnnnnnnnnnnnnnnnnnnnnnnnnnnnnnnnnnnnnnnnnnnnnnnnnnnnnnnnnnnnnnnnnnnnnnnnnnnnnnnnnnnnnnnnnnnnnnnnnnnnnnnnnnnnnnnnnnnnnnnnnnnnnnnnnnnnnnnnnnnnnnnnnnnnnnnnnnnnnnnnnnnnnnnnnnnnnnnnnnnnnnnnnnnnnnnnnnnnnnnnnnnnnnnnnnnnnnnnnnnnnnnnnnnnnnnnnnnnnnnnnnnnnnnnnnnnnnnnnnnnnnnnnnnnnnnnnnnnnnnnnnnnnnnnnnnnnnnnnnnnnnnnnnnnnnnnnnnnnnnnnnnnnnnnnnnnnnnnnnnnnnnnnnnnnnnnnnnnnnnnnnnnnnnnnnnnnnnnnnnnnnnnnnnnnnnnnnnnnnnnnnnnnnnnnnnnnnnnnnnnnnnnnnnnnnnnnnnnnnnnnnnnnnnnnnnnnnnnnnnnnnnnnnnnnnnnnnnnnnnnnnnnnnnnnnnnnnnnnnnnnnnnnnnnnnnnnnnnnnnnnnnnnnnnnnnnnnnnnnnnnnnnnnnnnnnnnnnnnnnnnnnnnnnnnnnnnnnnnnnnnnnnnnnnnnnnnnnnnnnnnnnnnnnnnnnnnnnnnnnnnnnnnnnnnnnnnnnnnnnnnnnnnnnnnnnnnnnnnnnnnnnnnnnnnnnnnnnnnnnnnnnnnnnnnnnnnnnnnnnnnnnnnnnnnnnnnnnnnnnnnnnnnnnnnnnnnnnnnnnnnnnnnnnnnnnnnnnnnnnnnnnnnnnnnnnnnnnnnnnnnnnnnnnnnnnnnnnnnnnnnnnnnnnnnnnnnnnnnnnnnnnnnnnnnnnnnnnnnnnnnnnnnnnnnnnnnnnnnnnnnnnnnnnnnnnnnnnnnnnnnnnnnnnnnnnnnnnnnnnnnnnnnnnnnnnnnnnnnnnnnnnnnnnnnnnnnnnnnnnnnnnnnnnnnnnnnnnnnnnnnnnnnnnnnnnnnnnnnnnnnnnnnnnnnnnnnnnnnnnnnnnnnnnnnnnnnnnnnnnnnnnnnnnnnnnnnnnnnnnnnnnnnnnnnnnnnnnnnnnnnnnnnnnnnnnnnnnnnnnnnnnnnnnnnnnnnnnnnnnnnnnnnnnnnnnnnnnnnnnnnnnnnnnnnnnnnnnnnnnnnnnnnnnnnnnnnnnnnnnnnnnnnnnnnnnnnnnnnnnnnnnnnnnnnnnnnnnnnnnnnnnnnnnnnnnnnnnnnnnnnnnnnnnnnnnnnnnnnnnnnnnnnnnnnnnnnnnnnnnnnnnnnnnnnnnnnnnnnnnnnnnnnnnnnnnnnnnnnnnnnnnnnnnnnnnnnnnnnnnnnnnnnnnnnnnnnnnnnnnnnnnnnnnnnnnnnnnnnnnnnnnnnnnnnnnnnnnnnnnnnnnnnnnnnnnnnnnnnnnnnnnnnnnnnnnnnnnnnnnnnnnnnnnnnnnnnnnnnnnnnnnnnnnnnnnnnnnnnnnnnnnnnnnnnnnnnnnnnnnnnnnnnnnnnnnnnnnnnnnnnnnnnnnnnnnnnnnnnnnnnnnnnnnnnnnnnnnnnnnnnnnnnnnnnnnnnnnnnnnnnnnnnnnnnnnnnnnnnnnnnnnnnnnnnnnnnnnnnnnnnnnnnnnnnnnnnnnnnnnnnnnnnnnnnnnnnnnnnnnnnnnnnnnnnnnnnnnnnnnnnnnnnnnnnnnnnnnnnnnnnnnnnnnnnnnnnnnnnnnnnnnnnnnnnnnnnnnnnnnnnnnnnnnnnnnnnnnnnnnnnnnnnnnnnnnnnnnnnnnnnnnnnnnnnnnnnnnnnnnnnnnnnnnnnnnnnnnnnnnnnnnnnnnnnnnnnnnnnnnnnnnnnnnnnnnnnnnnnnnnnnnnnnnnnnnnnnnnnnnnnnnnnnnnnnnnnnnnnnnnnnnnnnnnnnnnnnnnnnnnnnnnnnnnnnnnnnnnnnnnnnnnnnnnnnnnnnnnnnnnnnnnnnnnnnnnnnnnnnnnnnnnnnnnnnnnnnnnnnnnnnnnnnnnnnnnnnnnnnnnnnnnnnnnnnnnnnnnnnnnnnnnnnnnnnnnnnnnnnnnnnnnnnnnnnnnnnnnnnnnnnnnnnnnnnnnnnnnnnnnnnnnnnnnnnnnnnnnnnnnnnnnnnnnnnnnnnnnnnnnnnnnnnnnnnnnnnnnnnnnnnnnnnnnnnnnnnnnnnnnnnnnnnnnnnnnnnnnnnnnnnnnnnnnnnnnnnnnnnnnnnnnnnnnnnnnnnnnnnnnnnnnnnnnnnnnnnnnnnnnnnnnnnnnnnnnnnnnnnnnnnnnnnnnnnnnnnnnnnnnnnnnnnnnnnnnnnnnnnnnnnnnnnnnnnnnnnnnnnnnnnnnnnnnnnnnnnnnnnnnnnnnnnnnnnnnnnnnnnnnnnnnnnnnnnnnnnnnnnnnnnnnnnnnnnnnnnnnnnnnnnnnnnnnnnnnnnnnnnnnnnnnnnnnnnnnnnnnnnnnnnnnnnnnnnnnnnnnnnnnnnnnnnnnnnnnnnnnnnnnnnnnnnnnnnnnnnnnnnnnnnnnnnnnnnnnnnnnnnnnnnnnnnnnnnnnnnnnnnnnnnnnnnnnnnnnnnnnnnnnnnnnnnnnnnnnnnnnnnnnnnnnnnnnnnnnnnnnnnnnnnnnnnnnnnnnnnnnnnnnnnnnnnnnnnnnnnnnnnnnnnnnnnnnnnnnnnnnnnnnnnnnnnnnnnnnnnnnnnnnnnnnnnnnnnnnnnnnnnnnnnnnnnnnnnnnnnnnnnnnnnnnnnnnnnnnnnnnnnnnnnnnnnnnnnnnnnnnnnnnnnnnnnnnnnnnnnnnnnnnnnnnnnnnnnnnnnnnnnnnnnnnnnnnnnnnnnnnnnnnnnnnnnnnnnnnnnnnnnnnnnnnnnnnnnnnnnnnnnnnnnnnnnnnnnnnnnnnnnnnnnnnnnnnnnnnnnnnnnnnnnnnnnnnnnnnnnnnnnnnnnnnnnnnnnnnnnnnnnnnnnnnnnnnnnnnnnnnnnnnnnnnnnnnnnnnnnnnnnnnnnnnnnnnnnnnnnnnnnnnnnnnnnnnnnnnnnnnnnnnnnnnnnnnnnnnnnnnnnnnnnnnnnnnnnnnnnnnnnnnnnnnnnnnnnnnnnnnnnnnnnnnnnnnnnnnnnnnnnnnnnnnnnnnnnnnnnnnnnnnnnnnnnnnnnnnnnnnnnnnnnnnnnnnnnnnnnnnnnnnnnnnnnnnnnnnnnnnnnnnnnnnnnnnnnnnnnnnnnnnnnnnnnnnnnnnnnnnnnnnnnnnnnnnnnnnnnnnnnnnnnnnnnnnnnnnnnnnnnnnnnnnnnnnnnnnnnnnnnnnnnnnnnnnnnnnnnnnnnnnnnnnnnnnnnnnnnnnnnnnnnnnnnnnnnnnnnnnnnnnnnnnnnnnnnnnnnnnnnnnnnnnnnnnnnnnnnnnnnnnnnnnnnnnnnnnnnnnnnnnnnnnnnnnnnnnnnnnnnnnnnnnnnnnnnnnnnnnnnnnnnnnnnnnnnnnnnnnnnnnnnnnnnnnnnnnnnnnnnnnnnnnnnnnnnnnnnnnnnnnnnnnnnnnnnnnnnnnnnnnnnnnnnnnnnnnnnnnnnnnnnnnnnnnnnnnnnnnnnnnnnnnnnnnnnnnnnnnnnnnnnnnnnnnnnnnnnnnnnnnnnnnnnnnnnnnnnnnnnnnnnnnnnnnnnnnnnnnnnnnnnnnnnnnnnnnnnnnnnnnnnnnnnnnnnnnnnnnnnnnnnnnnnnnnnnnnnnnnnnnnnnnnnnnnnnnnnnnnnnnnnnnnnnnnnnnnnnnnnnnnnnnnnnnnnnnnnnnnnnnnnnnnnnnnnnnnnnnnnnnnnnnnnnnnnnnnnnnnnnnnnnnnnnnnnnnnnnnnnnnnnnnnnnnnnnnnnnnnnnnnnnnnnnnnnnnnnnnnnnnnnnnnnnnnnnnnnnnnnnnnnnnnnnnnnnnnnnnnnnnnnnnnnnnnnnnnnnnnnnnnnnnnnnnnnnnnnnnnnnnnnnnnnnnnnnnnnnnnnnnnnnnnnnnnnnnnnnnnnnnnnnnnnnnnnnnnnnnnnnnnnnnnnnnnnnnnnnnnnnnnnnnnnnnnnnnnnnnnnnnnnnnnnnnnnnnnnnnnnnnnnnnnnnnnnnnnnnnnnnnnnnnnnnnnnnnnnnnnnnnnnnnnnnnnnnnnnnnnnnnnnnnnnnnnnnnnnnnnnnnnnnnnnnnnnnnnnnnnnnnnnnnnnnnnnnnnnnnnnnnnnnnnnnnnnnnnnnnnnnnnnnnnnnnnnnnnnnnnnnnnnnnnnnnnnnnnnnnnnnnnnnnnnnnnnnnnnnnnnnnnnnnnnnnnnnnnnnnnnnnnnnnnnnnnnnnnnnnnnnnnnnnnnnnnnnnnnnnnnnnnnnnnnnnnnnnnnnnnnnnnnnnnnnnnnnnnnnnnnnnnnnnnnnnnnnnnnnnnnnnnnnnnnnnnnnnnnnnnnnnnnnnnnnnnnnnnnnnnnnnnnnnnnnnnnnnnnnnnnnnnnnnnnnnnnnnnnnnnnnnnnnnnnnnnnnnnnnnnnnnnnnnnnnnnnnnnnnnnnnnnnnnnnnnnnnnnnnnnnnnnnnnnnnnnnnnnnnnnnnnnnnnnnnnnnnnnnnnnnnnnnnnnnnnnnnnnnnnnnnnnnnnnnnnnnnnnnnnnnnnnnnnnnnnnnnnnnnnnnnnnnnnnnnnnnnnnnnnnnnnnnnnnnnnnnnnnnnnnnnnnnnnnnnnnnnnnnnnnnnnnnnnnnnnnnnnnnnnnnnnnnnnnnnnnnnnnnnnnnnnnnnnnnnnnnnnnnnnnnnnnnnnnnnnnnnnnnnnnnnnnnnnnnnnnnnnnnnnnnnnnnnnnnnnnnnnnnnnnnnnnnnnnnnnnnnnnnnnnnnnnnnnnnnnnnnnnnnnnnnnnnnnnnnnnnnnnnnnnnnnnnnnnnnnnnnnnnnnnnnnnnnnnnnnnnnnnnnnnnnnnnnnnnnnnnnnnnnnnnnnnnnnnnnnnnnnnnnnnnnnnnnnnnnnnnnnnnnnnnnnnnnnnnnnnnnnnnnnnnnnnnnnnnnnnnnnnnnnnnnnnnnnnnnnnnnnnnnnnnnnnnnnnnnnnnnnnnnnnnnnnnnnnnnnnnnnnnnnnnnnnnnnnnnnnnnnnnnnnnnnnnnnnnnnnnnnnnnnnnnnnnnnnnnnnnnnnnnnnnnnnnnnnnnnnnnnnnnnnnnnnnnnnnnnnnnnnnnnnnnnnnnnnnnnnnnnnnnnnnnnnnnnnnnnnnnnnnnnnnnnnnnnnnnnnnnnnnnnnnnnnnnnnnnnnnnnnnnnnnnnnnnnnnnnnnnnnnnnnnnnnnnnnnnnnnnnnnnnnnnnnnnnnnnnnnnnnnnnnnnnnnnnnnnnnnnnnnnnnnnnnnnnnnnnnnnnnnnnnnnnnnnnnnnnnnnnnnnnnnnnnnnnnnnnnnnnnnnnnnnnnnnnnnnnnnnnnnnnnnnnnnnnnnnnnnnnnnnnnnnnnnnnnnnnnnnnnnnnnnnnnnnnnnnnnnnnnnnnnnnnnnnnnnnnnnnnnnnnnnnnnnnnnnnnnnnnnnnnnnnnnnnnnnnnnnnnnnnnnnnnnnnnnnnnnnnnnnnnnnnnnnnnnnnnnnnnnnnnnnnnnnnnnnnnnnnnnnnnnnnnnnnnnnnnnnnnnnnnnnnnnnnnnnnnnnnnnnnnnnnnnnnnnnnnnnnnnnnnnnnnnnnnnnnnnnnnnnnnnnnnnnnnnnnnnnnnnnnnnnnnnnnnnnnnnnnnnnnnnnnnnnnnnnnnnnnnnnnnnnnnnnnnnnnnnnnnnnnnnnnnnnnnnnnnnnnnnnnnnnnnnnnnnnnnnnnnnnnnnnnnnnnnnnnnnnnnnnnnnnnnnnnnnnnnnnnnnnnnnnnnnnnnnnnnnnnnnnnnnnnnnnnnnnnnnnnnnnnnnnnnnnnnnnnnnnnnnnnnnnnnnnnnnnnnnnnnnnnnnnnnnnnnnnnnnnnnnnnnnnnnnnnnnnnnnnnnnnnnnnnnnnnnnnnnnnnnnnnnnnnnnnnnnnnnnnnnnnnnnnnnnnnnnnnnnnnnnnnnnnnnnnnnnnnnnnnnnnnnnnnnnnnnnnnnnnnnnnnnnnnnnnnnnnnnnnnnnnnnnnnnnnnnnnnnnnnnnnnnnnnnnnnnnnnnnnnnnnnnnnnnnnnnnnnnnnnnnnnnnnnnnnnnnnnnnnnnnnnnnnnnnnnnnnnnnnnnnnnnnnnnnnnnnnnnnnnnnnnnnnnnnnnnnnnnnnnnnnnnnnnnnnnnnnnnnnnnnnnnnnnnnnnnnnnnnnnnnnnnnnnnnnnnnnnnnnnnnnnnnnnnnnnnnnnnnnnnnnnnnnnnnnnnnnnnnnnnnnnnnnnnnnnnnnnnnnnnnnnnnnnnnnnnnnnnnnnnnnnnnnnnnnnnnnnnnnnnnnnnnnnnnnnnnnnnnnnnnnnnnnnnnnnnnnnnnnnnnnnnnnnnnnnnnnnnnnnnnnnnnnnnnnnnnnnnnnnnnnnnnnnnnnnnnnnnnnnnnnnnnnnnnnnnnnnnnnnnnnnnnnnnnnnnnnnnnnnnnnnnnnnnnnnnnnnnnnnnnnnnnnnnnnnnnnnnnnnnnnnnnnnnnnnnnnnnnnnnnnnnnnnnnnnnnnnnnnnnnnnnnnnnnnnnnnnnnnnnnnnnnnnnnnnnnnnnnnnnnnnnnnnnnnnnnnnnnnnnnnnnnnnnnnnnnnnnnnnnnnnnnnnnnnnnnnnnnnnnnnnnnnnnnnnnnnnnnnnnnnnnnnnnnnnnnnnnnnnnnnnnnnnnnnnnnnnnnnnnnnnnnnnnnnnnnnnnnnnnnnnnnnnnnnnnnnnnnnnnnnnnnnnnnnnnnnnnnnnnnnnnnnnnnnnnnnnnnnnnnnnnnnnnnnnnnnnnnnnnnnnnnnnnnnnnnnnnnnnnnnnnnnnnnnnnnnnnnnnnnnnnnnnnnnnnnnnnnnnnnnnnnnnnnnnnnnnnnnnnnnnnnnnnnnnnnnnnnnnnnnnnnnnnnnnnnnnnnnnnnnnnnnnnnnnnnnnnnnnnnnnnnnnnnnnnnnnnnnnnnnnnnnnnnnnnnnnnnnnnnnnnnnnnnnnnnnnnnnnnnnnnnnnnnnnnnnnnnnnnnnnnnnnnnnnnnnnnnnnnnnnnnnnnnnnnnnnnnnnnnnnnnnnnnnnnnnnnnnnnnnnnnnnnnnnnnnnnnnnnnnnnnnnnnnnnnnnnnnnnnnnnnnnnnnnnnnnnnnnnnnnnnnnnnnnnnnnnnnnnnnnnnnnnnnnnnnnnnnnnnnnnnnnnnnnnnnnnnnnnnnnnnnnnnnnnnnnnnnnnnnnnnnnnnnnnnnnnnnnnnnnnnnnnnnnnnnnnnnnnnnnnnnnnnnnnnnnnnnnnnnnnnnnnnnnnnnnnnnnnnnnnnnnnnnnnnnnnnnnnnnnnnnnnnnnnnnnnnnnnnnnnnnnnnnnnnnnnnnnnnnnnnnnnnnnnnnnnnnnnnnnnnnnnnnnnnnnnnnnnnnnnnnnnnnnnnnnnnnnnnnnnnnnnnnnnnnnnnnnnnnnnnnnnnnnnnnnnnnnnnnnnnnnnnnnnnnnnnnnnnnnnnnnnnnnnnnnnnnnnnnnnnnnnnnnnnnnnnnnnnnnnnnnnnnnnnnnnnnnnnnnnnnnnnnnnnnnnnnnnnnnnnnnnnnnnnnnnnnnnnnnnnnnnnnnnnnnnnnnnnnnnnnnnnnnnnnnnnnnnnnnnnnnnnnnnnnnnnnnnnnnnnnnnnnnnnnnnnnnnnnnnnnnnnnnnnnnnnnnnnnnnnnnnnnnnnnnnnnnnnnnnnnnnnnnnnnnnnnnnnnnnnnnnnnnnnnnnnnnnnnnnnnnnnnnnnnnnnnnnnnnnnnnnnnnnnnnnnnnnnnnnnnnnnnnnnnnnnnnnnnnnnnnnnnnnnnnnnnnnnnnnnnnnnnnnnnnnnnnnnnnnnnnnnnnnnnnnnnnnnnnnnnnnnnnnnnnnnnnnnnnnnnnnnnnnnnnnnnnnnnnnnnnnnnnnnnnnnnnnnnnnnnnnnnnnnnnnnnnnnnnnnnnnnnnnnnnnnnnnnnnnnnnnnnnnnnnnnnnnnnnnnnnnnnnnnnnnnnnnnnnnnnnnnnnnnnnnnnnnnnnnnnnnnnnnnnnnnnnnnnnnnnnnnnnnnnnnnnnnnnnnnnnnnnnnnnnnnnnnnnnnnnnnnnnnnnnnnnnnnnnnnnnnnnnnnnnnnnnnnnnnnnnnnnnnnnnnnnnnnnnnnnnnnnnnnnnnnnnnnnnnnnnnnnnnnnnnnnnnnnnnnnnnnnnnnnnnnnnnnnnnnnnnnnnnnnnnnnnnnnnnnnnnnnnnnnnnnnnnnnnnnnnnnnnnnnnnnnnnnnnnnnnnnnnnnnnnnnnnnnnnnnnnnnnnnnnnnnnnnnnnnnnnnnnnnnnnnnnnnnnnnnnnnnnnnnnnnnnnnnnnnnnnnnnnnnnnnnnnnnnnnnnnnnnnnnnnnnnnnnnnnnnnnnnnnnnnnnnnnnnnnnnnnnnnnnnnnnnnnnnnnnnnnnnnnnnnnnnnnnnnnnnnnnnnnnnnnnnnnnnnnnnnnnnnnnnnnnnnnnnnnnnnnnnnnnnnnnnnnnnnnnnnnnnnnnnnnnnnnnnnnnnnnnnnnnnnnnnnnnnnnnnnnnnnnnnnnnnnnnnnnnnnnnnnnnnnnnnnnnnnnnnnnnnnnnnnnnnnnnnnnnnnnnnnnnnnnnnnnnnnnnnnnnnnnnnnnnnnnnnnnnnnnnnnnnnnnnnnnnnnnnnnnnnnnnnnnnnnnnnnnnnnnnnnnnnnnnnnnnnnnnnnnnnnnnnnnnnnnnnnnnnnnnnnnnnnnnnnnnnnnnnnnnnnnnnnnnnnnnnnnnnnnnnnnnnnnnnnnnnnnnnnnnnnnnnnnnnnnnnnnnnnnnnnnnnnnnnnnnnnnnnnnnnnnnnnnnnnnnnnnnnnnnnnnnnnnnnnnnnnnnnnnnnnnnnnnnnnnnnnnnnnnnnnnnnnnnnnnnnnnnnnnnnnnnnnnnnnnnnnnnnnnnnnnnnnnnnnnnnnnnnnnnnnnnnnnnnnnnnnnnnnnnnnnnnnnnnnnnnnnnnnnnnnnnnnnnnnnnnnnnnnnnnnnnnnnnnnnnnnnnnnnnnnnnnnnnnnnnnnnnnnnnnnnnnnnnnnnnnnnnnnnnnnnnnnnnnnnnnnnnnnnnnnnnnnnnnnnnnnnnnnnnnnnnnnnnnnnnnnnnnnnnnnnnnnnnnnnnnnnnnnnnnnnnnnnnnnnnnnnnnnnnnnnnnnnnnnnnnnnnnnnnnnnnnnnnnnnnnnnnnnnnnnnnnnnnnnnnnnnnnnnnnnnnnnnnnnnnnnnnnnnnnnnnnnnnnnnnnnnnnnnnnnnnnnnnnnnnnnnnnnnnnnnnnnnnnnnnnnnnnnnnnnnnnnnnnnnnnnnnnnnnnnnnnnnnnnnnnnnnnnnnnnnnnnnnnnnnnnnnnnnnnnnnnnnnnnnnnnnnnnnnnnnnnnnnnnnnnnnnnnnnnnnnnnnnnnnnnnnnnnnnnnnnnnnnnnnnnnnnnnnnnnnnnnnnnnnnnnnnnnnnnnnnnnnnnnnnnnnnnnnnnnnnnnnnnnnnnnnnnnnnnnnnnnnnnnnnnnnnnnnnnnnnnnnnnnnnnnnnnnnnnnnnnnnnnnnnnnnnnnnnnnnnnnnnnnnnnnnnnnnnnnnnnnnnnnnnnnnnnnnnnnnnnnnnnnnnnnnnnnnnnnnnnnnnnnnnnnnnnnnnnnnnnnnnnnnnnnnnnnnnnnnnnnnnnnnnnnnnnnnnnnnnnnnnnnnnnnnnnnnnnnnnnnnnnnnnnnnnnnnnnnnnnnnnnnnnnnnnnnnnnnnnnnnnnnnnnnnnnnnnnnnnnnnnnnnnnnnnnnnnnnnnnnnnnnnnnnnnnnnnnnnnnnnnnnnnnnnnnnnnnnnnnnnnnnnnnnnnnnnnnnnnnnnnnnnnnnnnnnnnnnnnnnnnnnnnnnnnnnnnnnnnnnnnnnnnnnnnnnnnnnnnnnnnnnnnnnnnnnnnnnnnnnnnnnnnnnnnnnnnnnnnnnnnnnnnnnnnnnnnnnnnnnnnnnnnnnnnnnnnnnnnnnnnnnnnnnnnnnnnnnnnnnnnnnnnnnnnnnnnnnnnnnnnnnnnnnnnnnnnnnnnnnnnnnnnnnnnnnnnnnnnnnnnnnnnnnnnnnnnnnnnnnnnnnnnnnnnnnnnnnnnnnnnnnnnnnnnnnnnnnnnnnnnnnnnnnnnnnnnnnnnnnnnnnnnnnnnnnnnnnnnnnnnnnnnnnnnnnnnnnnnnnnnnnnnnnnnnnnnnnnnnnnnnnnnnnnnnnnnnnnnnnnnnnnnnnnnnnnnnnnnnnnnnnnnnnnnnnnnnnnnnnnnnnnnnnnnnnnnnnnnnnnnnnnnnnnnnnnnnnnnnnnnnnnnnnnnnnnnnnnnnnnnnnnnnnnnnnnnnnnnnnnnnnnnnnnnnnnnnnnnnnnnnnnnnnnnnnnnnnnnnnnnnnnnnnnnnnnnnnnnnnnnnnnnnnnnnnnnnnnnnnnnnnnnnnnnnnnnnnnnnnnnnnnnnnnnnnnnnnnnnnnnnnnnnnnnnnnnnnnnnnnnnnnnnnnnnnnnnnnnnnnnnnnnnnnnnnnnnnnnnnnnnnnnnnnnnnnnnnnnnnnnnnnnnnnnnnnnnnnnnnnnnnnnnnnnnnnnnnnnnnnnnnnnnnnnnnnnnnnnnnnnnnnnnnnnnnnnnnnnnnnnnnnnnnnnnnnnnnnnnnnnnnnnnnnnnnnnnnnnnnnnnnnnnnnnnnnnnnnnnnnnnnnnnnnnnnnnnnnnnnnnnnnnnnnnnnnnnnnnnnnnnnnnnnnnnnnnnnnnnnnnnnnnnnnnnnnnnnnnnnnnnnnnnnnnnnnnnnnnnnnnnnnnnnnnnnnnnnnnnnnnnnnnnnnnnnnnnnnnnnnnnnnnnnnnnnnnnnnnnnnnnnnnnnnnnnnnnnnnnnnnnnnnnnnnnnnnnnnnnnnnnnnnnnnnnnnnnnnnnnnnnnnnnnnnnnnnnnnnnnnnnnnnnnnnnnnnnnnnnnnnnnnnnnnnnnnnnnnnnnnnnnnnnnnnnnnnnnnnnnnnnnnnnnnnnnnnnnnnnnnnnnnnnnnnnnnnnnnnnnnnnnnnnnnnnnnnnnnnnnnnnnnnnnnnnnnnnnnnnnnnnnnnnnnnnnnnnnnnnnnnnnnnnnnnnnnnnnnnnnnnnnnnnnnnnnnnnnnnnnnnnnnnnnnnnnnnnnnnnnnnnnnnnnnnnnnnnnnnnnnnnnnnnnnnnnnnnnnnnnnnnnnnnnnnnnnnnnnnnnnnnnnnnnnnnnnnnnnnnnnnnnnnnnnnnnnnnnnnnnnnnnnnnnnnnnnnnnnnnnnnnnnnnnnnnnnnnnnnnnnnnnnnnnnnnnnnnnnnnnnnnnnnnnnnnnnnnnnnnnnnnnnnnnnnnnnnnnnnnnnnnnnnnnnnnnnnnnnnnnnnnnnnnnnnnnnnnnnnnnnnnnnnnnnnnnnnnnnnnnnnnnnnnnnnnnnnnnnnnnnnnnnnnnnnnnnnnnnnnnnnnnnnnnnnnnnnnnnnnnnnnnnnnnnnnnnnnnnnnnnnnnnnnnnnnnnnnnnnnnnnnnnnnnnnnnnnnnnnnnnnnnnnnnnnnnnnnnnnnnnnnnnnnnnnnnnnnnnnnnnnnnnnnnnnnnnnnnnnnnnnnnnnnnnnnnnnnnnnnnnnnnnnnnnnnnnnnnnnnnnnnnnnnnnnnnnnnnnnnnnnnnnnnnnnnnnnnnnnnnnnnnnnnnnnnnnnnnnnnnnnnnnnnnnnnnnnnnnnnnnnnnnnnnnnnnnnnnnnnnnnnnnnnnnnnnnnnnnnnnnnnnnnnnnnnnnnnnnnnnnnnnnnnnnnnnnnnnnnnnnnnnnnnnnnnnnnnnnnnnnnnnnnnnnnnnnnnnnnnnnnnnnnnnnnnnnnnnnnnnnnnnnnnnnnnnnnnnnnnnnnnnnnnnnnnnnnnnnnnnnnnnnnnnnnnnnnnnnnnnnnnnnnnnnnnnnnnnnnnnnnnnnnnnnnnnnnnnnnnnnnnnnnnnnnnnnnnnnnnnnnnnnnnnnnnnnnnnnnnnnnnnnnnnnnnnnnnnnnnnnnnnnnnnnnnnnnnnnnnnnnnnnnnnnnnnnnnnnnnnnnnnnnnnnnnnnnnnnnnnnnnnnnnnnnnnnnnnnnnnnnnnnnnnnnnnnnnnnnnnnnnnnnnnnnnnnnnnnnnnnnnnnnnnnnnnnnnnnnnnnnnnnnnnnnnnnnnnnnnnnnnnnnnnnnnnnnnnnnnnnnnnnnnnnnnnnnnnnnnnnnnnnnnnnnnnnnnnnnnnnnnnnnnnnnnnnnnnnnnnnnnnnnnnnnnnnnnnnnnnnnnnnnnnnnnnnnnnnnnnnnnnnnnnnnnnnnnnnnnnnnnnnnnnnnnnnnnnnnnnnnnnnnnnnnnnnnnnnnnnnnnnnnnnnnnnnnnnnnnnnnnnnnnnnnnnnnnnnnnnnnnnnnnnnnnnnnnnnnnnnnnnnnnnnnnnnnnnnnnnnnnnnnnnnnnnnnnnnnnnnnnnnnnnnnnnnnnnnnnnnnnnnnnnnnnnnnnnnnnnnnnnnnnnnnnnnnnnnnnnnnnnnnnnnnnnnnnnnnnnnnnnnnnnnnnnnnnnnnnnnnnnnnnnnnnnnnnnnnnnnnnnnnnnnnnnnnnnnnnnnnnnnnnnnnnnnnnnnnnnnnnnnnnnnnnnnnnnnnnnnnnnnnnnnnnnnnnnnnnnnnnnnnnnnnnnnnnnnnnnnnnnnnnnnnnnnnnnnnnnnnnnnnnnnnnnnnnnnnnnnnnnnnnnnnnnnnnnnnnnnnnnnnnnnnnnnnnnnnnnnnnnnnnnnnnnnnnnnnnnnnnnnnnnnnnnnnnnnnnnnnnnnnnnnnnnnnnnnnnnnnnnnnnnnnnnnnnnnnnnnnnnnnnnnnnnnnnnnnnnnnnnnnnnnnnnnnnnnnnnnnnnnnnnnnnnnnnnnnnnnnnnnnnnnnnnnnnnnnnnnnnnnnnnnnnnnnnnnnnnnnnnnnnnnnnnnnnnnnnnnnnnnnnnnnnnnnnnnnnnnnnnnnnnnnnnnnnnnnnnnnnnnnnnnnnnnnnnnnnnnnnnnnnnnnnnnnnnnnnnnnnnnnnnnnnnnnnnnnnnnnnnnnnnnnnnnnnnnnnnnnnnnnnnnnnnnnnnnnnnnnnnnnnnnnnnnnnnnnnnnnnnnnnnnnnnnnnnnnnnnnnnnnnnnnnnnnnnnnnnnnnnnnnnnnnnnnnnnnnnnnnnnnnnnnnnnnnnnnnnnnnnnnnnnnnnnnnnnnnnnnnnnnnnnnnnnnnnnnnnnnnnnnnnnnnnnnnnnnnnnnnnnnnnnnnnnnnnnnnnnnnnnnnnnnnnnnnnnnnnnnnnnnnnnnnnnnnnnnnnnnnnnnnnnnnnnnnnnnnnnnnnnnnnnnnnnnnnnnnnnnnnnnnnnnnnnnnnnnnnnnnnnnnnnnnnnnnnnnnnnnnnnnnnnnnnnnnnnnnnnnnnnnnnnnnnnnnnnnnnnnnnnnnnnnnnnnnnnnnnnnnnnnnnnnnnnnnnnnnnnnnnnnnnnnnnnnnnnnnnnnnnnnnnnnnnnnnnnnnnnnnnnnnnnnnnnnnnnnnnnnnnnnnnnnnnnnnnnnnnnnnnnnnnnnnnnnnnnnnnnnnnnnnnnnnnnnnnnnnnnnnnnnnnnnnnnnnnnnnnnnnnnnnnnnnnnnnnnnnnnnnnnnnnnnnnnnnnnnnnnnnnnnnnnnnnnnnnnnnnnnnnnnnnnnnnnnnnnnnnnnnnnnnnnnnnnnnnnnnnnnnnnnnnnnnnnnnnnnnnnnnnnnnnnnnnnnnnnnnnnnnnnnnnnnnnnnnnnnnnnnnnnnnnnnnnnnnnnnnnnnnnnnnnnnnnnnnnnnnnnnnnnnnnnnnnnnnnnnnnnnnnnnnnnnnnnnnnnnnnnnnnnnnnnnnnnnnnnnnnnnnnnnnnnnnnnnnnnnnnnnnnnnnnnnnnnnnnnnnnnnnnnnnnnnnnnnnnnnnnnnnnnnnnnnnnnnnnnnnnnnnnnnnnnnnnnnnnnnnnnnnnnnnnnnnnnnnnnnnnnnnnnnnnnnnnnnnnnnnnnnnnnnnnnnnnnnnnnnnnnnnnnnnnnnnnnnnnnnnnnnnnnnnnnnnnnnnnnnnnnnnnnnnnnnnnnnnnnnnnnnnnnnnnnnnnnnnnnnnnnnnnnnnnnnnnnnnnnnnnnnnnnnnnnnnnnnnnnnnnnnnnnnnnnnnnnnnnnnnnnnnnnnnnnnnnnnnnnnnnnnnnnnnnnnnnnnnnnnnnnnnnnnnnnnnnnnnnnnnnnnnnnnnnnnnnnnnnnnnnnnnnnnnnnnnnnnnnnnnnnnnnnnnnnnnnnnnnnnnnnnnnnnnnnnnnnnnnnnnnnnnnnnnnnnnnnnnnnnnnnnnnnnnnnnnnnnnnnnnnnnnnnnnnnnnnnnnnnnnnnnnnnnnnnnnnnnnnnnnnnnnnnnnnnnnnnnnnnnnnnnnnnnnnnnnnnnnnnnnnnnnnnnnnnnnnnnnnnnnnnnnnnnnnnnnnnnnnnnnnnnnnnnnnnnnnnnnnnnnnnnnnnnnnnnnnnnnnnnnnnnnnnnnnnnnnnnnnnnnnnnnnnnnnnnnnnnnnnnnnnnnnnnnnnnnnnnnnnnnnnnnnnnnnnnnnnnnnnnnnnnnnnnnnnnnnnnnnnnnnnnnnnnnnnnnnnnnnnnnnnnnnnnnnnnnnnnnnnnnnnnnnnnnnnnnnnnnnnnnnnnnnnnnnnnnnnnnnnnnnnnnnnnnnnnnnnnnnnnnnnnnnnnnnnnnnnnnnnnnnnnnnnnnnnnnnnnnnnnnnnnnnnnnnnnnnnnnnnnnnnnnnnnnnnnnnnnnnnnnnnnnnnnnnnnnnnnnnnnnnnnnnnnnnnnnnnnnnnnnnnnnnnnnnnnnnnnnnnnnnnnnnnnnnnnnnnnnnnnnnnnnnnnnnnnnnnnnnnnnnnnnnnnnnnnnnnnnnnnnnnnnnnnnnnnnnnnnnnnnnnnnnnnnnnnnnnnnnnnnnnnnnnnnnnnnnnnnnnnnnnnnnnnnnnnnnnnnnnnnnnnnnnnnnnnnnnnnnnnnnnnnnnnnnnnnnnnnnnnnnnnnnnnnnnnnnnnnnnnnnnnnnnnnnnnnnnnnnnnnnnnnnnnnnnnnnnnnnnnnnnnnnnnnnnnnnnnnnnnnnnnnnnnnnnnnnnnnnnnnnnnnnnnnnnnnnnnnnnnnnnnnnnnnnnnnnnnnnnnnnnnnnnnnnnnnnnnnnnnnnnnnnnnnnnnnnnnnnnnnnnnnnnnnnnnnnnnnnnnnnnnnnnnnnnnnnnnnnnnnnnnnnnnnnnnnnnnnnnnnnnnnnnnnnnnnnnnnnnnnnnnnnnnnnnnnnnnnnnnnnnnnnnnnnnnnnnnnnnnnnnnnnnnnnnnnnnnnnnnnnnnnnnnnnnnnnnnnnnnnnnnnnnnnnnnnnnnnnnnnnnnnnnnnnnnnnnnnnnnnnnnnnnnnnnnnnnnnnnnnnnnnnnnnnnnnnnnnnnnnnnnnnnnnnnnnnnnnnnnnnnnnnnnnnnnnnnnnnnnnnnnnnnnnnnnnnnnnnnnnnnnnnnnnnnnnnnnnnnnnnnnnnnnnnnnnnnnnnnnnnnnnnnnnnnnnnnnnnnnnnnnnnnnnnnnnnnnnnnnnnnnnnnnnnnnnnnnnnnnnnnnnnnnnnnnnnnnnnnnnnnnnnnnnnnnnnnnnnnnnnnnnnnnnnnnnnnnnnnnnnnnnnnnnnnnnnnnnnnnnnnnnnnnnnnnnnnnnnnnnnnnnnnnnnnnnnnnnnnnnnnnnnnnnnnnnnnnnnnnnnnnnnnnnnnnnnnnnnnnnnnnnnnnnnnnnnnnnnnnnnnnnnnnnnnnnnnnnnnnnnnnnnnnnnnnnnnnnnnnnnnnnnnnnnnnnnnnnnnnnnnnnnnnnnnnnnnnnnnnnnnnnnnnnnnnnnnnnnnnnnnnnnnnnnnnnnnnnnnnnnnnnnnnnnnnnnnnnnnnnnnnnnnnnnnnnnnnnnnnnnnnnnnnnnnnnnnnnnnnnnnnnnnnnnnnnnnnnnnnnnnnnnnnnnnnnnnnnnnnnnnnnnnnnnnnnnnnnnnnnnnnnnnnnnnnnnnnnnnnnnnnnnnnnnnnnnnnnnnnnnnnnnnnnnnnnnnnnnnnnnnnnnnnnnnnnnnnnnnnnnnnnnnnnnnnnnnnnnnnnnnnnnnnnnnnnnnnnnnnnnnnnnnnnnnnnnnnnnnnnnnnnnnnnnnnnnnnnnnnnnnnnnnnnnnnnnnnnnnnnnnnnnnnnnnnnnnnnnnnnnnnnnnnnnnnnnnnnnnnnnnnnnnnnnnnnnnnnnnnnnnnnnnnnnnnnnnnnnnnnnnnnnnnnnnnnnnnnnnnnnnnnnnnnnnnnnnnnnnnnnnnnnnnnnnnnnnnnnnnnnnnnnnnnnnnnnnnnnnnnnnnnnnnnnnnnnnnnnnnnnnnnnnnnnnnnnnnnnnnnnnnnnnnnnnnnnnnnnnnnnnnnnnnnnnnnnnnnnnnnnnnnnnnnnnnnnnnnnnnnnnnnnnnnnnnnnnnnnnnnnnnnnnnnnnnnnnnnnnnnnnnnnnnnnnnnnnnnnnnnnnnnnnnnnnnnnnnnnnnnnnnnnnnnnnnnnnnnnnnnnnnnnnnnnnnnnnnnnnnnnnnnnnnnnnnnnnnnnnnnnnnnnnnnnnnnnnnnnnnnnnnnnnnnnnnnnnnnnnnnnnnnnnnnnnnnnnnnnnnnnnnnnnnnnnnnnnnnnnnnnnnnnnnnnnnnnnnnnnnnnnnnnnnnnnnnnnnnnnnnnnnnnnnnnnnnnnnnnnnnnnnnnnnnnnnnnnnnnnnnnnnnnnnnnnnnnnnnnnnnnnnnnnnnnnnnnnnnnnnnnnnnnnnnnnnnnnnnnnnnnnnnnnnnnnnnnnnnnnnnnnnnnnnnnnnnnnnnnnnnnnnnnnnnnnnnnnnnnnnnnnnnnnnnnnnnnnnnnnnnnnnnnnnnnnnnnnnnnnnnnnnnnnnnnnnnnnnnnnnnnnnnnnnnnnnnnnnnnnnnnnnnnnnnnnnnnnnnnnnnnnnnnnnnnnnnnnnnnnnnnnnnnnnnnnnnnnnnnnnnnnnnnnnnnnnnnnnnnnnnnnnnnnnnnnnnnnnnnnnnnnnnnnnnnnnnnnnnnnnnnnnnnnnnnnnnnnnnnnnnnnnnnnnnnnnnnnnnnnnnnnnnnnnnnnnnnnnnnnnnnnnnnnnnnnnnnnnnnnnnnnnnnnnnnnnnnnnnnnnnnnnnnnnnnnnnnnnnnnnnnnnnnnnnnnnnnnnnnnnnnnnnnnnnnnnnnnnnnnnnnnnnnnnnnnnnnnnnnnnnnnnnnnnnnnnnnnnnnnnnnnnnnnnnnnnnnnnnnnnnnnnnnnnnnnnnnnnnnnnnnnnnnnnnnnnnnnnnnnnnnnnnnnnnnnnnnnnnnnnnnnnnnnnnnnnnnnnnnnnnnnnnnnnnnnnnnnnnnnnnnnnnnnnnnnnnnnnnnnnnnnnnnnnnnnnnnnnnnnnnnnnnnnnnnnnnnnnnnnnnnnnnnnnnnnnnnnnnnnnnnnnnnnnnnnnnnnnnnnnnnnnnnnnnnnnnnnnnnnnnnnnnnnnnnnnnnnnnnnnnnnnnnnnnnnnnnnnnnnnnnnnnnnnnnnnnnnnnnnnnnnnnnnnnnnnnnnnnnnnnnnnnnnnnnnnnnnnnnnnnnnnnnnnnnnnnnnnnnnnnnnnnnnnnnnnnnnnnnnnnnnnnnnnnnnnnnnnnnnnnnnnnnnnnnnnnnnnnnnnnnnnnnnnnnnnnnnnnnnnnnnnnnnnnnnnnnnnnnnnnnnnnnnnnnnnnnnnnnnnnnnnnnnnnnnnnnnnnnnnnnnnnnnnnnnnnnnnnnnnnnnnnnnnnnnnnnnnnnnnnnnnnnnnnnnnnnnnnnnnnnnnnnnnnnnnnnnnnnnnnnnnnnnnnnnnnnnnnnnnnnnnnnnnnnnnnnnnnnnnnnnnnnnnnnnnnnnnnnnnnnnnnnnnnnnnnnnnnnnnnnnnnnnnnnnnnnnnnnnnnnnnnnnnnnnnnnnnnnnnnnnnnnnnnnnnnnnnnnnnnnnnnnnnnnnnnnnnnnnnnnnnnnnnnnnnnnnnnnnnnnnnnnnnnnnnnnnnnnnnnnnnnnnnnnnnnnnnnnnnnnnnnnnnnnnnnnnnnnnnnnnnnnnnnnnnnnnnnnnnnnnnnnnnnnnnnnnnnnnnnnnnnnnnnnnnnnnnnnnnnnnnnnnnnnnnnnnnnnnnnnnnnnnnnnnnnnnnnnnnnnnnnnnnnnnnnnnnnnnnnnnnnnnnnnnnnnnnnnnnnnnnnnnnnnnnnnnnnnnnnnnnnnnnnnnnnnnnnnnnnnnnnnnnnnnnnnnnnnnnnnnnnnnnnnnnnnnnnnnnnnnnnnnnnnnnnnnnnnnnnnnnnnnnnnnnnnnnnnnnnnnnnnnnnnnnnnnnnnnnnnnnnnnnnnnnnnnnnnnnnnnnnnnnnnnnnnnnnnnnnnnnnnnnnnnnnnnnnnnnnnnnnnnnnnnnnnnnnnnnnnnnnnnnnnnnnnnnnnnnnnnnnnnnnnnnnnnnnnnnnnnnnnnnnnnnnnnnnnnnnnnnnnnnnnnnnnnnnnnnnnnnnnnnnnnnnnnnnnnnnnnnnnnnnnnnnnnnnnnnnnnnnnnnnnnnnnnnnnnnnnnnnnnnnnnnnnnnnnnnnnnnnnnnnnnnnnnnnnnnnnnnnnnnnnnnnnnnnnnnnnnnnnnnnnnnnnnnnnnnnnnnnnnnnnnnnnnnnnnnnnnnnnnnnnnnnnnnnnnnnnnnnnnnnnnnnnnnnnnnnnnnnnnnnnnnnnnnnnnnnnnnnnnnnnnnnnnnnnnnnnnnnnnnnnnnnnnnnnnnnnnnnnnnnnnnnnnnnnnnnnnnnnnnnnnnnnnnnnnnnnnnnnnnnnnnnnnnnnnnnnnnnnnnnnnnnnnnnnnnnnnnnnnnnnnnnnnnnnnnnnnnnnnnnnnnnnnnnnnnnnnnnnnnnnnnnnnnnnnnnnnnnnnnnnnnnnnnnnnnnnnnnnnnnnnnnnnnnnnnnnnnnnnnnnnnnnnnnnnnnnnnnnnnnnnnnnnnnnnnnnnnnnnnnnnnnnnnnnnnnnnnnnnnnnnnnnnnnnnnnnnnnnnnnnnnnnnnnnnnnnnnnnnnnnnnnnnnnnnnnnnnnnnnnnnnnnnnnnnnnnnnnnnnnnnnnnnnnnnnnnnnnnnnnnnnnnnnnnnnnnnnnnnnnnnnnnnnnnnnnnnnnnnnnnnnnnnnnnnnnnnnnnnnnnnnnnnnnnnnnnnnnnnnnnnnnnnnnnnnnnnnnnnnnnnnnnnnnnnnnnnnnnnnnnnnnnnnnnnnnnnnnnnnnnnnnnnnnnnnnnnnnnnnnnnnnnnnnnnnnnnnnnnnnnnnnnnnnnnnnnnnnnnnnnnnnnnnnnnnnnnnnnnnnnnnnnnnnnnnnnnnnnnnnnnnnnnnnnnnnnnnnnnnnnnnnnnnnnnnnnnnnnnnnnnnnnnnnnnnnnnnnnnnnnnnnnnnnnnnnnnnnnnnnnnnnnnnnnnnnnnnnnnnnnnnnnnnnnnnnnnnnnnnnnnnnnnnnnnnnnnnnnnnnnnnnnnnnnnnnnnnnnnnnnnnnnnnnnnnnnnnnnnnnnnnnnnnnnnnnnnnnnnnnnnnnnnnnnnnnnnnnnnnnnnnnnnnnnnnnnnnnnnnnnnnnnnnnnnnnnnnnnnnnnnnnnnnnnnnnnnnnnnnnnnnnnnnnnnnnnnnnnnnnnnnnnnnnnnnnnnnnnnnnnnnnnnnnnnnnnnnnnnnnnnnnnnnnnnnnnnnnnnnnnnnnnnnnnnnnnnnnnnnnnnnnnnnnnnnnnnnnnnnnnnnnnnnnnnnnnnnnnnnnnnnnnnnnnnnnnnnnnnnnnnnnnnnnnnnnnnnnnnnnnnnnnnnnnnnnnnnnnnnnnnnnnnnnnnnnnnnnnnnnnnnnnnnnnnnnnnnnnnnnnnnnnnnnnnnnnnnnnnnnnnnnnnnnnnnnnnnnnnnnnnnnnnnnnnnnnnnnnnnnnnnnnnnnnnnnnnnnnnnnnnnnnnnnnnnnnnnnnnnnnnnnnnnnnnnnnnnnnnnnnnnnnnnnnnnnnnnnnnnnnnnnnnnnnnnnnnnnnnnnnnnnnnnnnnnnnnnnnnnnnnnnnnnnnnnnnnnnnnnnnnnnnnnnnnnnnnnnnnnnnnnnnnnnnnnnnnnnnnnnnnnnnnnnnnnnnnnnnnnnnnnnnnnnnnnnnnnnnnnnnnnnnnnnnnnnnnnnnnnnnnnnnnnnnnnnnnnnnnnnnnnnnnnnnnnnnnnnnnnnnnnnnnnnnnnnnnnnnnnnnnnnnnnnnnnnnnnnnnnnnnnnnnnnnnnnnnnnnnnnnnnnnnnnnnnnnnnnnnnnnnnnnnnnnnnnnnnnnnnnnnnnnnnnnnnnnnnnnnnnnnnnnnnnnnnnnnnnnnnnnnnnnnnnnnnnnnnnnnnnnnnnnnnnnnnnnnnnnnnnnnnnnnnnnnnnnnnnnnnnnnnnnnnnnnnnnnnnnnnnnnnnnnnnnnnnnnnnnnnnnnnnnnnnnnnnnnnnnnnnnnnnnnnnnnnnnnnnnnnnnnnnnnnnnnnnnnnnnnnnnnnnnnnnnnnnnnnnnnnnnnnnnnnnnnnnnnnnnnnnnnnnnnnnnnnnnnnnnnnnnnnnnnnnnnnnnnnnnnnnnnnnnnnnnnnnnnnnnnnnnnnnnnnnnnnnnnnnnnnnnnnnnnnnnnnnnnnnnnnnnnnnnnnnnnnnnnnnnnnnnnnnnnnnnnnnnnnnnnnnnnnnnnnnnnnnnnnnnnnnnnnnnnnnnnnnnnnnnnnnnnnnnnnnnnnnnnnnnnnnnnnnnnnnnnnnnnnnnnnnnnnnnnnnnnnnnnnnnnnnnnnnnnnnnnnnnnnnnnnnnnnnnnnnnnnnnnnnnnnnnnnnnnnnnnnnnnnnnnnnnnnnnnnnnnnnnnnnnnnnnnnnnnnnnnnnnnnnnnnnnnnnnnnnnnnnnnnnnnnnnnnnnnnnnnnnnnnnnnnnnnnnnnnnnnnnnnnnnnnnnnnnnnnnnnnnnnnnnnnnnnnnnnnnnnnnnnnnnnnnnnnnnnnnnnnnnnnnnnnnnnnnnnnnnnnnnnnnnnnnnnnnnnnnnnnnnnnnnnnnnnnnnnnnnnnnnnnnnnnnnnnnnnnnnnnnnnnnnnnnnnnnnnnnnnnnnnnnnnnnnnnnnnnnnnnnnnnnnnnnnnnnnnnnnnnnnnnnnnnnnnnnnnnnnnnnnnnnnnnnnnnnnnnnnnnnnnnnnnnnnnnnnnnnnnnnnnnnnnnnnnnnnnnnnnnnnnnnnnnnnnnnnnnnnnnnnnnnnnnnnnnnnnnnnnnnnnnnnnnnnnnnnnnnnnnnnnnnnnnnnnnnnnnnnnnnnnnnnnnnnnnnnnnnnnnnnnnnnnnnnnnnnnnnnnnnnnnnnnnnnnnnnnnnnnnnnnnnnnnnnnnnnnnnnnnnnnnnnnnnnnnnnnnnnnnnnnnnnnnnnnnnnnnnnnnnnnnnnnnnnnnnnnnnnnnnnnnnnnnnnnnnnnnnnnnnnnnnnnnnnnnnnnnnnnnnnnnnnnnnnnnnnnnnnnnnnnnnnnnnnnnnnnnnnnnnnnnnnnnnnnnnnnnnnnnnnnnnnnnnnnnnnnnnnnnnnnnnnnnnnnnnnnnnnnnnnnnnnnnnnnnnnnnnnnnnnnnnnnnnnnnnnnnnnnnnnnnnnnnnnnnnnnnnnnnnnnnnnnnnnnnnnnnnnnnnnnnnnnnnnnnnnnnnnnnnnnnnnnnnnnnnnnnnnnnnnnnnnnnnnnnnnnnnnnnnnnnnnnnnnnnnnnnnnnnnnnnnnnnnnnnnnnnnnnnnnnnnnnnnnnnnnnnnnnnnnnnnnnnnnnnnnnnnnnnnnnnnnnnnnnnnnnnnnnnnnnnnnnnnnnnnnnnnnnnnnnnnnnnnnnnnnnnnnnnnnnnnnnnnnnnnnnnnnnnnnnnnnnnnnnnnnnnnnnnnnnnnnnnnnnnnnnnnnnnnnnnnnnnnnnnnnnnnnnnnnnnnnnnnnnnnnnnnnnnnnnnnnnnnnnnnnnnnnnnnnnnnnnnnnnnnnnnnnnnnnnnnnnnnnnnnnnnnnnnnnnnnnnnnnnnnnnnnnnnnnnnnnnnnnnnnnnnnnnnnnnnnnnnnnnnnnnnnnnnnnnnnnnnnnnnnnnnnnnnnnnnnnnnnnnnnnnnnnnnnnnnnnnnnnnnnnnnnnnnnnnnnnnnnnnnnnnnnnnnnnnnnnnnnnnnnnnnnnnnnnnnnnnnnnnnnnnnnnnnnnnnnnnnnnnnnnnnnnnnnnnnnnnnnnnnnnnnnnnnnnnnnnnnnnnnnnnnnnnnnnnnnnnnnnnnnnnnnnnnnnnnnnnnnnnnnnnnnnnnnnnnnnnnnnnnnnnnnnnnnnnnnnnnnnnnnnnnnnnnnnnnnnnnnnnnnnnnnnnnnnnnnnnnnnnnnnnnnnnnnnnnnnnnnnnnnnnnnnnnnnnnnnnnnnnnnnnnnnnnnnnnnnnnnnnnnnnnnnnnnnnnnnnnnnnnnnnnnnnnnnnnnnnnnnnnnnnnnnnnnnnnnnnnnnnnnnnnnnnnnnnnnnnnnnnnnnnnnnnnnnnnnnnnnnnnnnnnnnnnnnnnnnnnnnnnnnnnnnnnnnnnnnnnnnnnnnnnnnnnnnnnnnnnnnnnnnnnnnnnnnnnnnnnnnnnnnnnnnnnnnnnnnnnnnnnnnnnnnnnnnnnnnnnnnnnnnnnnnnnnnnnnnnnnnnnnnnnnnnnnnnnnnnnnnnnnnnnnnnnnnnnnnnnnnnnnnnnnnnnnnnnnnnnnnnnnnnnnnnnnnnnnnnnnnnnnnnnnnnnnnnnnnnnnnnnnnnnnnnnnnnnnnnnnnnnnnnnnnnnnnnnnnnnnnnnnnnnnnnnnnnnnnnnnnnnnnnnnnnnnnnnnnnnnnnnnnnnnnnnnnnnnnnnnnnnnnnnnnnnnnnnnnnnnnnnnnnnnnnnnnnnnnnnnnnnnnnnnnnnnnnnnnnnnnnnnnnnnnnnnnnnnnnnnnnnnnnnnnnnnnnnnnnnnnnnnnnnnnnnnnnnnnnnnnnnnnnnnnnnnnnnnnnnnnnnnnnnnnnnnnnnnnnnnnnnnnnnnnnnnnnnnnnnnnnnnnnnnnnnnnnnnnnnnnnnnnnnnnnnnnnnnnnnnnnnnnnnnnnnnnnnnnnnnnnnnnnnnnnnnnnnnnnnnnnnnnnnnnnnnnnnnnnnnnnnnnnnnnnnnnnnnnnnnnnnnnnnnnnnnnnnnnnnnnnnnnnnnnnnnnnnnnnnnnnnnnnnnnnnnnnnnnnnnnnnnnnnnnnnnnnnnnnnnnnnnnnnnnnnnnnnnnnnnnnnnnnnnnnnnnnnnnnnnnnnnnnnnnnnnnnnnnnnnnnnnnnnnnnnnnnnnnnnnnnnnnnnnnnnnnnnnnnnnnnnnnnnnnnnnnnnnnnnnnnnnnnnnnnnnnnnnnnnnnnnnnnnnnnnnnnnnnnnnnnnnnnnnnnnnnnnnnnnnnnnnnnnnnnnnnnnnnnnnnnnnnnnnnnnnnnnnnnnnnnnnnnnnnnnnnnnnnnnnnnnnnnnnnnnnnnnnnnnnnnnnnnnnnnnnnnnnnnnnnnnnnnnnnnnnnnnnnnnnnnnnnnnnnnnnnnnnnnnnnnnnnnnnnnnnnnnnnnnnnnnnnnnnnnnnnnnnnnnnnnnnnnnnnnnnnnnnnnnnnnnnnnnnnnnnnnnnnnnnnnnnnnnnnnnnnnnnnnnnnnnnnnnnnnnnnnnnnnnnnnnnnnnnnnnnnnnnnnnnnnnnnnnnnnnnnnnnnnnnnnnnnnnnnnnnnnnnnnnnnnnnnnnnnnnnnnnnnnnnnnnnnnnnnnnnnnnnnnnnnnnnnnnnnnnnnnnnnnnnnnnnnnnnnnnnnnnnnnnnnnnnnnnnnnnnnnnnnnnnnnnnnnnnnnnnnnnnnnnnnnnnnnnnnnnnnnnnnnnnnnnnnnnnnnnnnnnnnnnnnnnnnnnnnnnnnnnnnnnnnnnnnnnnnnnnnnnnnnnnnnnnnnnnnnnnnnnnnnnnnnnnnnnnnnnnnnnnnnnnnnnnnnnnnnnnnnnnnnnnnnnnnnnnnnnnnnnnnnnnnnnnnnnnnnnnnnnnnnnnnnnnnnnnnnnnnnnnnnnnnnnnnnnnnnnnnnnnnnnnnnnnnnnnnnnnnnnnnnnnnnnnnnnnnnnnnnnnnnnnnnnnnnnnnnnnnnnnnnnnnnnnnnnnnnnnnnnnnnnnnnnnnnnnnnnnnnnnnnnnnnnnnnnnnnnnnnnnnnnnnnnnnnnnnnnnnnnnnnnnnnnnnnnnnnnnnnnnnnnnnnnnnnnnnnnnnnnnnnnnnnnnnnnnnnnnnnnnnnnnnnnnnnnnnnnnnnnnnnnnnnnnnnnnnnnnnnnnnnnnnnnnnnnnnnnnnnnnnnnnnnnnnnnnnnnnnnnnnnnnnnnnnnnnnnnnnnnnnnnnnnnnnnnnnnnnnnnnnnnnnnnnnnnnnnnnnnnnnnnnnnnnnnnnnnnnnnnnnnnnnnnnnnnnnnnnnnnnnnnnnnnnnnnnnnnnnnnnnnnnnnnnnnnnnnnnnnnnnnnnnnnnnnnnnnnnnnnnnnnnnnnnnnnnnnnnnnnnnnnnnnnnnnnnnnnnnnnnnnnnnnnnnnnnnnnnnnnnnnnnnnnnnnnnnnnnnnnnnnnnnnnnnnnnnnnnnnnnnnnnnnnnnnnnnnnnnnnnnnnnnnnnnnnnnnnnnnnnnnnnnnnnnnnnnnnnnnnnnnnnnnnnnnnnnnnnnnnnnnnnnnnnnnnnnnnnnnnnnnnnnnnnnnnnnnnnnnnnnnnnnnnnnnnnnnnnnnnnnnnnnnnnnnnnnnnnnnnnnnnnnnnnnnnnnnnnnnnnnnnnnnnnnnnnnnnnnnnnnnnnnnnnnnnnnnnnnnnnnnnnnnnnnnnnnnnnnnnnnnnnnnnnnnnnnnnnnnnnnnnnnnnnnnnnnnnnnnnnnnnnnnnnnnnnnnnnnnnnnnnnnnnnnnnnnnnnnnnnnnnnnnnnnnnnnnnnnnnnnnnnnnnnnnnnnnnnnnnnnnnnnnnnnnnnnnnnnnnnnnnnnnnnnnnnnnnnnnnnnnnnnnnnnnnnnnnnnnnnnnnnnnnnnnnnnnnnnnnnnnnnnnnnnnnnnnnnnnnnnnnnnnnnnnnnnnnnnnnnnnnnnnnnnnnnnnnnnnnnnnnnnnnnnnnnnnnnnnnnnnnnnnnnnnnnnnnnnnnnnnnnnnnnnnnnnnnnnnnnnnnnnnnnnnnnnnnnnnnnnnnnnnnnnnnnnnnnnnnnnnnnnnnnnnnnnnnnnnnnnnnnnnnnnnnnnnnnnnnnnnnnnnnnnnnnnnnnnnnnnnnnnnnnnnnnnnnnnnnnnnnnnnnnnnnnnnnnnnnnnnnnnnnnnnnnnnnnnnnnnnnnnnnnnnnnnnnnnnnnnnnnnnnnnnnnnnnnnnnnnnnnnnnnnnnnnnnnnnnnnnnnnnnnnnnnnnnnnnnnnnnnnnnnnnnnnnnnnnnnnnnnnnnnnnnnnnnnnnnnnnnnnnnnnnnnnnnnnnnnnnnnnnnnnnnnnnnnnnnnnnnnnnnnnnnnnnnnnnnnnnnnnnnnnnnnnnnnnnnnnnnnnnnnnnnnnnnnnnnnnnnnnnnnnnnnnnnnnnnnnnnnnnnnnnnnnnnnnnnnnnnnnnnnnnnnnnnnnnnnnnnnnnnnnnnnnnnnnnnnnnnnnnnnnnnnnnnnnnnnnnnnnnnnnnnnnnnnnnnnnnnnnnnnnnnnnnnnnnnnnnnnnnnnnnnnnnnnnnnnnnnnnnnnnnnnnnnnnnnnnnnnnnnnnnnnnnnnnnnnnnnnnnnnnnnnnnnnnnnnnnnnnnnnnnnnnnnnnnnnnnnnnnnnnnnnnnnnnnnnnnnnnnnnnnnnnnnnnnnnnnnnnnnnnnnnnnnnnnnnnnnnnnnnnnnnnnnnnnnnnnnnnnnnnnnnnnnnnnnnnnnnnnnnnnnnnnnnnnnnnnnnnnnnnnnnnnnnnnnnnnnnnnnnnnnnnnnnnnnnnnnnnnnnnnnnnnnnnnnnnnnnnnnnnnnnnnnnnnnnnnnnnnnnnnnnnnnnnnnnnnnnnnnnnnnnnnnnnnnnnnnnnnnnnnnnnnnnnnnnnnnnnnnnnnnnnnnnnnnnnnnnnnnnnnnnnnnnnnnnnnnnnnnnnnnnnnnnnnnnnnnnnnnnnnnnnnnnnnnnnnnnnnnnnnnnnnnnnnnnnnnnnnnnnnnnnnnnnnnnnnnnnnnnnnnnnnnnnnnnnnnnnnnnnnnnnnnnnnnnnnnnnnnnnnnnnnnnnnnnnnnnnnnnnnnnnnnnnnnnnnnnnnnnnnnnnnnnnnnnnnnnnnnnnnnnnnnnnnnnnnnnnnnnnnnnnnnnnnnnnnnnnnnnnnnnnnnnnnnnnnnnnnnnnnnnnnnnnnnnnnnnnnnnnnnnnnnnnnnnnnnnnnnnnnnnnnnnnnnnnnnnnnnnnnnnnnnnnnnnnnnnnnnnnnnnnnnnnnnnnnnnnnnnnnnnnnnnnnnnnnnnnnnnnnnnnnnnnnnnnnnnnnnnnnnnnnnnnnnnnnnnnnnnnnnnnnnnnnnnnnnnnnnnnnnnnnnnnnnnnnnnnnnnnnnnnnnnnnnnnnnnnnnnnnnnnnnnnnnnnnnnnnnnnnnnnnnnnnnnnnnnnnnnnnnnnnnnnnnnnnnnnnnnnnnnnnnnnnnnnnnnnnnnnnnnnnnnnnnnnnnnnnnnnnnnnnnnnnnnnnnnnnnnnnnnnnnnnnnnnnnnnnnnnnnnnnnnnnnnnnnnnnnnnnnnnnnnnnnnnnnnnnnnnnnnnnnnnnnnnnnnnnnnnnnnnnnnnnnnnnnnnnnnnnnnnnnnnnnnnnnnnnnnnnnnnnnnnnnnnnnnnnnnnnnnnnnnnnnnnnnnnnnnnnnnnnnnnnnnnnnnnnnnnnnnnnnnnnnnnnnnnnnnnnnnnnnnnnnnnnnnnnnnnnnnnnnnnnnnnnnnnnnnnnnnnnnnnnnnnnnnnnnnnnnnnnnnnnnnnnnnnnnnnnnnnnnnnnnnnnnnnnnnnnnnnnnnnnnnnnnnnnnnnnnnnnnnnnnnnnnnnnnnnnnnnnnnnnnnnnnnnnnnnnnnnnnnnnnnnnnnnnnnnnnnnnnnnnnnnnnnnnnnnnnnnnnnnnnnnnnnnnnnnnnnnnnnnnnnnnnnnnnnnnnnnnnnnnnnnnnnnnnnnnnnnnnnnnnnnnnnnnnnnnnnnnnnnnnnnnnnnnnnnnnnnnnnnnnnnnnnnnnnnnnnnnnnnnnnnnnnnnnnnnnnnnnnnnnnnnnnnnnnnnnnnnnnnnnnnnnnnnnnnnnnnnnnnnnnnnnnnnnnnnnnnnnnnnnnnnnnnnnnnnnnnnnnnnnnnnnnnnnnnnnnnnnnnnnnnnnnnnnnnnnnnnnnnnnnnnnnnnnnnnnnnnnnnnnnnnnnnnnnnnnnnnnnnnnnnnnnnnnnnnnnnnnnnnnnnnnnnnnnnnnnnnnnnnnnnnnnnnnnnnnnnnnnnnnnnnnnnnnnnnnnnnnnnnnnnnnnnnnnnnnnnnnnnnnnnnnnnnnnnnnnnnnnnnnnnnnnnnnnnnnnnnnnnnnnnnnnnnnnnnnnnnnnnnnnnnnnnnnnnnnnnnnnnnnnnnnnnnnnnnnnnnnnnnnnnnnnnnnnnnnnnnnnnnnnnnnnnnnnnnnnnnnnnnnnnnnnnnnnnnnnnnnnnnnnnnnnnnnnnnnnnnnnnnnnnnnnnnnnnnnnnnnnnnnnnnnnnnnnnnnnnnnnnnnnnnnnnnnnnnnnnnnnnnnnnnnnnnnnnnnnnnnnnnnnnnnnnnnnnnnnnnnnnnnnnnnnnnnnnnnnnnnnnnnnnnnnnnnnnnnnnnnnnnnnnnnnnnnnnnnnnnnnnnnnnnnnnnnnnnnnnnnnnnnnnnnnnnnnnnnnnnnnnnnnnnnnnnnnnnnnnnnnnnnnnnnnnnnnnnnnnnnnnnnnnnnnnnnnnnnnnnnnnnnnnnnnnnnnnnnnnnnnnnnnnnnnnnnnnnnnnnnnnnnnnnnnnnnnnnnnnnnnnnnnnnnnnnnnnnnnnnnnnnnnnnnnnnnnnnnnnnnnnnnnnnnnnnnnnnnnnnnnnnnnnnnnnnnnnnnnnnnnnnnnnnnnnnnnnnnnnnnnnnnnnnnnnnnnnnnnnnnnnnnnnnnnnnnnnnnnnnnnnnnnnnnnnnnnnnnnnnnnnnnnnnnnnnnnnnnnnnnnnnnnnnnnnnnnnnnnnnnnnnnnnnnnnnnnnnnnnnnnnnnnnnnnnnnnnnnnnnnnnnnnnnnnnnnnnnnnnnnnnnnnnnnnnnnnnnnnnnnnnnnnnnnnnnnnnnnnnnnnnnnnnnnnnnnnnnnnnnnnnnnnnnnnnnnnnnnnnnnnnnnnnnnnnnnnnnnnnnnnnnnnnnnnnnnnnnnnnnnnnnnnnnnnnnnnnnnnnnnnnnnnnnnnnnnnnnnnnnnnnnnnnnnnnnnnnnnnnnnnnnnnnnnnnnnnnnnnnnnnnnnnnnnnnnnnnnnnnnnnnnnnnnnnnnnnnnnnnnnnnnnnnnnnnnnnnnnnnnnnnnnnnnnnnnnnnnnnnnnnnnnnnnnnnnnnnnnnnnnnnnnnnnnnnnnnnnnnnnnnnnnnnnnnnnnnnnnnnnnnnnnnnnnnnnnnnnnnnnnnnnnnnnnnnnnnnnnnnnnnnnnnnnnnnnnnnnnnnnnnnnnnnnnnnnnnnnnnnnnnnnnnnnnnnnnnnnnnnnnnnnnnnnnnnnnnnnnnnnnnnnnnnnnnnnnnnnnnnnnnnnnnnnnnnnnnnnnnnnnnnnnnnnnnnnnnnnnnnnnnnnnnnnnnnnnnnnnnnnnnnnnnnnnnnnnnnnnnnnnnnnnnnnnnnnnnnnnnnnnnnnnnnnnnnnnnnnnnnnnnnnnnnnnnnnnnnnnnnnnnnnnnnnnnnnnnnnnnnnnnnnnnnnnnnnnnnnnnnnnnnnnnnnnnnnnnnnnnnnnnnnnnnnnnnnnnnnnnnnnnnnnnnnnnnnnnnnnnnnnnnnnnnnnnnnnnnnnnnnnnnnnnnnnnnnnnnnnnnnnnnnnnnnnnnnnnnnnnnnnnnnnnnnnnnnnnnnnnnnnnnnnnnnnnnnnnnnnnnnnnnnnnnnnnnnnnnnnnnnnnnnnnnnnnnnnnnnnnnnnnnnnnnnnnnnnnnnnnnnnnnnnnnnnnnnnnnnnnnnnnnnnnnnnnnnnnnnnnnnnnnnnnnnnnnnnnnnnnnnnnnnnnnnnnnnnnnnnnnnnnnnnnnnnnnnnnnnnnnnnnnnnnnnnnnnnnnnnnnnnnnnnnnnnnnnnnnnnnnnnnnnnnnnnnnnnnnnnnnnnnnnnnnnnnnnnnnnnnnnnnnnnnnnnnnnnnnnnnnnnnnnnnnnnnnnnnnnnnnnnnnnnnnnnnnnnnnnnnnnnnnnnnnnnnnnnnnnnnnnnnnnnnnnnnnnnnnnnnnnnnnnnnnnnnnnnnnnnnnnnnnnnnnnnnnnnnnnnnnnnnnnnnnnnnnnnnnnnnnnnnnnnnnnnnnnnnnnnnnnnnnnnnnnnnnnnnnnnnnnnnnnnnnnnnnnnnnnnnnnnnnnnnnnnnnnnnnnnnnnnnnnnnnnnnnnnnnnnnnnnnnnnnnnnnnnnnnnnnnnnnnnnnnnnnnnnnnnnnnnnnnnnnnnnnnnnnnnnnnnnnnnnnnnnnnnnnnnnnnnnnnnnnnnnnnnnnnnnnnnnnnnnnnnnnnnnnnnnnnnnnnnnnnnnnnnnnnnnnnnnnnnnnnnnnnnnnnnnnnnnnnnnnnnnnnnnnnnnnnnnnnnnnnnnnnnnnnnnnnnnnnnnnnnnnnnnnnnnnnnnnnnnnnnnnnnnnnnnnnnnnnnnnnnnnnnnnnnnnnnnnnnnnnnnnnnnnnnnnnnnnnnnnnnnnnnnnnnnnnnnnnnnnnnnnnnnnnnnnnnnnnnnnnnnnnnnnnnnnnnnnnnnnnnnnnnnnnnnnnnnnnnnnnnnnnnnnnnnnnnnnnnnnnnnnnnnnnnnnnnnnnnnnnnnnnnnnnnnnnnnnnnnnnnnnnnnnnnnnnnnnnnnnnnnnnnnnnnnnnnnnnnnnnnnnnnnnnnnnnnnnnnnnnnnnnnnnnnnnnnnnnnnnnnnnnnnnnnnnnnnnnnnnnnnnnnnnnnnnnnnnnnnnnnnnnnnnnnnnnnnnnnnnnnnnnnnnnnnnnnnnnnnnnnnnnnnnnnnnnnnnnnnnnnnnnnnnnnnnnnnnnnnnnnnnnnnnnnnnnnnnnnnnnnnnnnnnnnnnnnnnnnnnnnnnnnnnnnnnnnnnnnnnnnnnnnnnnnnnnnnnnnnnnnnnnnnnnnnnnnnnnnnnnnnnnnnnnnnnnnnnnnnnnnnnnnnnnnnnnnnnnnnnnnnnnnnnnnnnnnnnnnnnnnnnnnnnnnnnnnnnnnnnnnnnnnnnnnnnnnnnnnnnnnnnnnnnnnnnnnnnnnnnnnnnnnnnnnnnnnnnnnnnnnnnnnnnnnnnnnnnnnnnnnnnnnnnnnnnnnnnnnnnnnnnnnnnnnnnnnnnnnnnnnnnnnnnnnnnnnnnnnnnnnnnnnnnnnnnnnnnnnnnnnnnnnnnnnnnnnnnnnnnnnnnnnnnnnnnnnnnnnnnnnnnnnnnnnnnnnnnnnnnnnnnnnnnnnnnnnnnnnnnnnnnnnnnnnnnnnnnnnnnnnnnnnnnnnnnnnnnnnnnnnnnnnnnnnnnnnnnnnnnnnnnnnnnnnnnnnnnnnnnnnnnnnnnnnnnnnnnnnnnnnnnnnnnnnnnnnnnnnnnnnnnnnnnnnnnnnnnnnnnnnnnnnnnnnnnnnnnnnnnnnnnnnnnnnnnnnnnnnnnnnnnnnnnnnnnnnnnnnnnnnnnnnnnnnnnnnnnnnnnnnnnnnnnnnnnnnnnnnnnnnnnnnnnnnnnnnnnnnnnnnnnnnnnnnnnnnnnnnnnnnnnnnnnnnnnnnnnnnnnnnnnnnnnnnnnnnnnnnnnnnnnnnnnnnnnnnnnnnnnnnnnnnnnnnnnnnnnnnnnnnnnnnnnnnnnnnnnnnnnnnnnnnnnnnnnnnnnnnnnnnnnnnnnnnnnnnnnnnnnnnnnnnnnnnnnnnnnnnnnnnnnnnnnnnnnnnnnnnnnnnnnnnnnnnnnnnnnnnnnnnnnnnnnnnnnnnnnnnnnnnnnnnnnnnnnnnnnnnnnnnnnnnnnnnnnnnnnnnnnnnnnnnnnnnnnnnnnnnnnnnnnnnnnnnnnnnnnnnnnnnnnnnnnnnnnnnnnnnnnnnnnnnnnnnnnnnnnnnnnnnnnnnnnnnnnnnnnnnnnnnnnnnnnnnnnnnnnnnnnnnnnnnnnnnnnnnnnnnnnnnnnnnnnnnnnnnnnnnnnnnnnnnnnnnnnnnnnnnnnnnnnnnnnnnnnnnnnnnnnnnnnnnnnnnnnnnnnnnnnnnnnnnnnnnnnnnnnnnnnnnnnnnnnnnnnnnnnnnnnnnnnnnnnnnnnnnnnnnnnnnnnnnnnnnnnnnnnnnnnnnnnnnnnnnnnnnnnnnnnnnnnnnnnnnnnnnnnnnnnnnnnnnnnnnnnnnnnnnnnnnnnnnnnnnnnnnnnnnnnnnnnnnnnnnnnnnnnnnnnnnnnnnnnnnnnnnnnnnnnnnnnnnnnnnnnnnnnnnnnnnnnnnnnnnnnnnnnnnnnnnnnnnnnnnnnnnnnnnnnnnnnnnnnnnnnnnnnnnnnnnnnnnnnnnnnnnnnnnnnnnnnnnnnnnnnnnnnnnnnnnnnnnnnnnnnnnnnnnnnnnnnnnnnnnnnnnnnnnnnnnnnnnnnnnnnnnnnnnnnnnnnnnnnnnnnnnnnnnnnnnnnnnnnnnnnnnnnnnnnnnnnnnnnnnnnnnnnnnnnnnnnnnnnnnnnnnnnnnnnnnnnnnnnnnnnnnnnnnnnnnnnnnnnnnnnnnnnnnnnnnnnnnnnnnnnnnnnnnnnnnnnnnnnnnnnnnnnnnnnnnnnnnnnnnnnnnnnnnnnnnnnnnnnnnnnnnnnnnnnnnnnnnnnnnnnnnnnnnnnnnnnnnnnnnnnnnnnnnnnnnnnnnnnnnnnnnnnnnnnnnnnnnnnnnnnnnnnnnnnnnnnnnnnnnnnnnnnnnnnnnnnnnnnnnnnnnnnnnnnnnnnnnnnnnnnnnnnnnnnnnnnnnnnnnnnnnnnnnnnnnnnnnnnnnnnnnnnnnnnnnnnnnnnnnnnnnnnnnnnnnnnnnnnnnnnnnnnnnnnnnnnnnnnnnnnnnnnnnnnnnnnnnnnnnnnnnnnnnnnnnnnnnnnnnnnnnnnnnnnnnnnnnnnnnnnnnnnnnnnnnnnnnnnnnnnnnnnnnnnnnnnnnnnnnnnnnnnnnnnnnnnnnnnnnnnnnnnnnnnnnnnnnnnnnnnnnnnnnnnnnnnnnnnnnnnnnnnnnnnnnnnnnnnnnnnnnnnnnnnnnnnnnnnnnnnnnnnnnnnnnnnnnnnnnnnnnnnnnnnnnnnnnnnnnnnnnnnnnnnnnnnnnnnnnnnnnnnnnnnnnnnnnnnnnnnnnnnnnnnnnnnnnnnnnnnnnnnnnnnnnnnnnnnnnnnnnnnnnnnnnnnnnnnnnnnnnnnnnnnnnnnnnnnnnnnnnnnnnnnnnnnnnnnnnnnnnnnnnnnnnnnnnnnnnnnnnnnnnnnnnnnnnnnnnnnnnnnnnnnnnnnnnnnnnnnnnnnnnnnnnnnnnnnnnnnnnnnnnnnnnnnnnnnnnnnnnnnnnnnnnnnnnnnnnnnnnnnnnnnnnnnnnnnnnnnnnnnnnnnnnnnnnnnnnnnnnnnnnnnnnnnnnnnnnnnnnnnnnnnnnnnnnnnnnnnnnnnnnnnnnnnnnnnnnnnnnnnnnnnnnnnnnnnnnnnnnnnnnnnnnnnnnnnnnnnnnnnnnnnnnnnnnnnnnnnnnnnnnnnnnnnnnnnnnnnnnnnnnnnnnnnnnnnnnnnnnnnnnnnnnnnnnnnnnnnnnnnnnnnnnnnnnnnnnnnnnnnnnnnnnnnnnnnnnnnnnnnnnnnnnnnnnnnnnnnnnnnnnnnnnnnnnnnnnnnnnnnnnnnnnnnnnnnnnnnnnnnnnnnnnnnnnnnnnnnnnnnnnnnnnnnnnnnnnnnnnnnnnnnnnnnnnnnnnnnnnnnnnnnnnnnnnnnnnnnnnnnnnnnnnnnnnnnnnnnnnnnnnnnnnnnnnnnnnnnnnnnnnnnnnnnnnnnnnnnnnnnnnnnnnnnnnnnnnnnnnnnnnnnnnnnnnnnnnnnnnnnnnnnnnnnnnnnnnnnnnnnnnnnnnnnnnnnnnnnnnnnnnnnnnnnnnnnnnnnnnnnnnnnnnnnnnnnnnnnnnnnnnnnnnnnnnnnnnnnnnnnnnnnnnnnnnnnnnnnnnnnnnnnnnnnnnnnnnnnnnnnnnnnnnnnnnnnnnnnnnnnnnnnnnnnnnnnnnnnnnnnnnnnnnnnnnnnnnnnnnnnnnnnnnnnnnnnnnnnnnnnnnnnnnnnnnnnnnnnnnnnnnnnnnnnnnnnnnnnnnnnnnnnnnnnnnnnnnnnnnnnnnnnnnnnnnnnnnnnnnnnnnnnnnnnnnnnnnnnnnnnnnnnnnnnnnnnnnnnnnnnnnnnnnnnnnnnnnnnnnnnnnnnnnnnnnnnnnnnnnnnnnnnnnnnnnnnnnnnnnnnnnnnnnnnnnnnnnnnnnnnnnnnnnnnnnnnnnnnnnnnnnnnnnnnnnnnnnnnnnnnnnnnnnnnnnnnnnnnnnnnnnnnnnnnnnnnnnnnnnnnnnnnnnnnnnnnnnnnnnnnnnnnnnnnnnnnnnnnnnnnnnnnnnnnnnnnnnnnnnnnnnnnnnnnnnnnnnnnnnnnnnnnnnnnnnnnnnnnnnnnnnnnnnnnnnnnnnnnnnnnnnnnnnnnnnnnnnnnnnnnnnnnnnnnnnnnnnnnnnnnnnnnnnnnnnnnnnnnnnnnnnnnnnnnnnnnnnnnnnnnnnnnnnnnnnnnnnnnnnnnnnnnnnnnnnnnnnnnnnnnnnnnnnnnnnnnnnnnnnnnnnnnnnnnnnnnnnnnnnnnnnnnnnnnnnnnnnnnnnnnnnnnnnnnnnnnnnnnnnnnnnnnnnnnnnnnnnnnnnnnnnnnnnnnnnnnnnnnnnnnnnnnnnnnnnnnnnnnnnnnnnnnnnnnnnnnnnnnnnnnnnnnnnnnnnnnnnnnnnnnnnnnnnnnnnnnnnnnnnnnnnnnnnnnnnnnnnnnnnnnnnnnnnnnnnnnnnnnnnnnnnnnnnnnnnnnnnnnnnnnnnnnnnnnnnnnnnnnnnnnnnnnnnnnnnnnnnnnnnnnnnnnnnnnnnnnnnnnnnnnnnnnnnnnnnnnnnnnnnnnnnnnnnnnnnnnnnnnnnnnnnnnnnnnnnnnnnnnnnnnnnnnnnnnnnnnnnnnnnnnnnnnnnnnnnnnnnnnnnnnnnnnnnnnnnnnnnnnnnnnnnnnnnnnnnnnnnnnnnnnnnnnnnnnnnnnnnnnnnnnnnnnnnnnnnnnnnnnnnnnnnnnnnnnnnnnnnnnnnnnnnnnnnnnnnnnnnnnnnnnnnnnnnnnnnnnnnnnnnnnnnnnnnnnnnnnnnnnnnnnnnnnnnnnnnnnnnnnnnnnnnnnnnnnnnnnnnnnnnnnnnnnnnnnnnnnnnnnnnnnnnnnnnnnnnnnnnnnnnnnnnnnnnnnnnnnnnnnnnnnnnnnnnnnnnnnnnnnnnnnnnnnnnnnnnnnnnnnnnnnnnnnnnnnnnnnnnnnnnnnnnnnnnnnnnnnnnnnnnnnnnnnnnnnnnnnnnnnnnnnnnnnnnnnnnnnnnnnnnnnnnnnnnnnnnnnnnnnnnnnnnnnnnnnnnnnnnnnnnnnnnnnnnnnnnnnnnnnnnnnnnnnnnnnnnnnnnnnnnnnnnnnnnnnnnnnnnnnnnnnnnnnnnnnnnnnnnnnnnnnnnnnnnnnnnnnnnnnnnnnnnnnnnnnnnnnnnnnnnnnnnnnnnnnnnnnnnnnnnnnnnnnnnnnnnnnnnnnnnnnnnnnnnnnnnnnnnnnnnnnnnnnnnnnnnnnnnnnnnnnnnnnnnnnnnnnnnnnnnnnnnnnnnnnnnnnnnnnnnnnnnnnnnnnnnnnnnnnnnnnnnnnnnnnnnnnnnnnnnnnnnnnnnnnnnnnnnnnnnnnnnnnnnnnnnnnnnnnnnnnnnnnnnnnnnnnnnnnnnnnnnnnnnnnnnnnnnnnnnnnnnnnnnnnnnnnnnnnnnnnnnnnnnnnnnnnnnnnnnnnnnnnnnnnnnnnnnnnnnnnnnnnnnnnnnnnnnnnnnnnnnnnnnnnnnnnnnnnnnnnnnnnnnnnnnnnnnnnnnnnnnnnnnnnnnnnnnnnnnnnnnnnnnnnnnnnnnnnnnnnnnnnnnnnnnnnnnnnnnnnnnnnnnnnnnnnnnnnnnnnnnnnnnnnnnnnnnnnnnnnnnnnnnnnnnnnnnnnnnnnnnnnnnnnnnnnnnnnnnnnnnnnnnnnnnnnnnnnnnnnnnnnnnnnnnnnnnnnnnnnnnnnnnnnnnnnnnnnnnnnnnnnnnnnnnnnnnnnnnnnnnnnnnnnnnnnnnnnnnnnnnnnnnnnnnnnnnnnnnnnnnnnnnnnnnnnnnnnnnnnnnnnnnnnnnnnnnnnnnnnnnnnnnnnnnnnnnnnnnnnnnnnnnnnnnnnnnnnnnnnnnnnnnnnnnnnnnnnnnnnnnnnnnnnnnnnnnnnnnnnnnnnnnnnnnnnnnnnnnnnnnnnnnnnnnnnnnnnnnnnnnnnnnnnnnnnnnnnnnnnnnnnnnnnnnnnnnnnnnnnnnnnnnnnnnnnnnnnnnnnnnnnnnnnnnnnnnnnnnnnnnnnnnnnnnnnnnnnnnnnnnnnnnnnnnnnnnnnnnnnnnnnnnnnnnnnnnnnnnnnnnnnnnnnnnnnnnnnnnnnnnnnnnnnnnnnnnnnnnnnnnnnnnnnnnnnnnnnnnnnnnnnnnnnnnnnnnnnnnnnnnnnnnnnnnnnnnnnnnnnnnnnnnnnnnnnnnnnnnnnnnnnnnnnnnnnnnnnnnnnnnnnnnnnnnnnnnnnnnnnnnnnnnnnnnnnnnnnnnnnnnnnnnnnnnnnnnnnnnnnnnnnnnnnnnnnnnnnnnnnnnnnnnnnnnnnnnnnnnnnnnnnnnnnnnnnnnnnnnnnnnnnnnnnnnnnnnnnnnnnnnnnnnnnnnnnnnnnnnnnnnnnnnnnnnnnnnnnnnnnnnnnnnnnnnnnnnnnnnnnnnnnnnnnnnnnnnnnnnnnnnnnnnnnnnnnnnnnnnnnnnnnnnnnnnnnnnnnnnnnnnnnnnnnnnnnnnnnnnnnnnnnnnnnnnnnnnnnnnnnnnnnnnnnnnnnnnnnnnnnnnnnnnnnnnnnnnnnnnnnnnnnnnnnnnnnnnnnnnnnnnnnnnnnnnnnnnnnnnnnnnnnnnnnnnnnnnnnnnnnnnnnnnnnnnnnnnnnnnnnnnnnnnnnnnnnnnnnnnnnnnnnnnnnnnnnnnnnnnnnnnnnnnnnnnnnnnnnnnnnnnnnnnnnnnnnnnnnnnnnnnnnnnnnnnnnnnnnnnnnnnnnnnnnnnnnnnnnnnnnnnnnnnnnnnnnnnnnnnnnnnnnnnnnnnnnnnnnnnnnnnnnnnnnnnnnnnnnnnnnnnnnnnnnnnnnnnnnnnnnnnnnnnnnnnnnnnnnnnnnnnnnnnnnnnnnnnnnnnnnnnnnnnnnnnnnnnnnnnnnnnnnnnnnnnnnnnnnnnnnnnnnnnnnnnnnnnnnnnnnnnnnnnnnnnnnnnnnnnnnnnnnnnnnnnnnnnnnnnnnnnnnnnnnnnnnnnnnnnnnnnnnnnnnnnnnnnnnnnnnnnnnnnnnnnnnnnnnnnnnnnnnnnnnnnnnnnnnnnnnnnnnnnnnnnnnnnnnnnnnnnnnnnnnnnnnnnnnnnnnnnnnnnnnnnnnnnnnnnnnnnnnnnnnnnnnnnnnnnnnnnnnnnnnnnnnnnnnnnnnnnnnnnnnnnnnnnnnnnnnnnnnnnnnnnnnnnnnnnnnnnnnnnnnnnnnnnnnnnnnnnnnnnnnnnnnnnnnnnnnnnnnnnnnnnnnnnnnnnnnnnnnnnnnnnnnnnnnnnnnnnnnnnnnnnnnnnnnnnnnnnnnnnnnnnnnnnnnnnnnnnnnnnnnnnnnnnnnnnnnnnnnnnnnnnnnnnnnnnnnnnnnnnnnnnnnnnnnnnnnnnnnnnnnnnnnnnnnnnnnnnnnnnnnnnnnnnnnnnnnnnnnnnnnnnnnnnnnnnnnnnnnnnnnnnnnnnnnnnnnnnnnnnnnnnnnnnnnnnnnnnnnnnnnnnnnnnnnnnnnnnnnnnnnnnnnnnnnnnnnnnnnnnnnnnnnnnnnnnnnnnnnnnnnnnnnnnnnnnnnnnnnnnnnnnnnnnnnnnnnnnnnnnnnnnnnnnnnnnnnnnnnnnnnnnnnnnnnnnnnnnnnnnnnnnnnnnnnnnnnnnnnnnnnnnnnnnnnnnnnnnnnnnnnnnnnnnnnnnnnnnnnnnnnnnnnnnnnnnnnnnnnnnnnnnnnnnnnnnnnnnnnnnnnnnnnnnnnnnnnnnnnnnnnnnnnnnnnnnnnnnnnnnnnnnnnnnnnnnnnnnnnnnnnnnnnnnnnnnnnnnnnnnnnnnnnnnnnnnnnnnnnnnnnnnnnnnnnnnnnnnnnnnnnnnnnnnnnnnnnnnnnnnnnnnnnnnnnnnnnnnnnnnnnnnnnnnnnnnnnnnnnnnnnnnnnnnnnnnnnnnnnnnnnnnnnnnnnnnnnnnnnnnnnnnnnnnnnnnnnnnnnnnnnnnnnnnnnnnnnnnnnnnnnnnnnnnnnnnnnnnnnnnnnnnnnnnnnnnnnnnnnnnnnnnnnnnnnnnnnnnnnnnnnnnnnnnnnnnnnnnnnnnnnnnnnnnnnnnnnnnnnnnnnnnnnnnnnnnnnnnnnnnnnnnnnnnnnnnnnnnnnnnnnnnnnnnnnnnnnnnnnnnnnnnnnnnnnnnnnnnnnnnnnnnnnnnnnnnnnnnnnnnnnnnnnnnnnnnnnnnnnnnnnnnnnnnnnnnnnnnnnnnnnnnnnnnnnnnnnnnnnnnnnnnnnnnnnnnnnnnnnnnnnnnnnnnnnnnnnnnnnnnnnnnnnnnnnnnnnnnnnnnnnnnnnnnnnnnnnnnnnnnnnnnnnnnnnnnnnnnnnnnnnnnnnnnnnnnnnnnnnnnnnnnnnnnnnnnnnnnnnnnnnnnnnnnnnnnnnnnnnnnnnnnnnnnnnnnnnnnnnnnnnnnnnnnnnnnnnnnnnnnnnnnnnnnnnnnnnnnnnnnnnnnnnnnnnnnnnnnnnnnnnnnnnnnnnnnnnnnnnnnnnnnnnnnnnnnnnnnnnnnnnnnnnnnnnnnnnnnnnnnnnnnnnnnnnnnnnnnnnnnnnnnnnnnnnnnnnnnnnnnnnnnnnnnnnnnnnnnnnnnnnnnnnnnnnnnnnnnnnnnnnnnnnnnnnnnnnnnnnnnnnnnnnnnnnnnnnnnnnnnnnnnnnnnnnnnnnnnnnnnnnnnnnnnnnnnnnnnnnnnnnnnnnnnnnnnnnnnnnnnnnnnnnnnnnnnnnnnnnnnnnnnnnnnnnnnnnnnnnnnnnnnnnnnnnnnnnnnnnnnnnnnnnnnnnnnnnnnnnnnnnnnnnnnnnnnnnnnnnnnnnnnnnnnnnnnnnnnnnnnnnnnnnnnnnnnnnnnnnnnnnnnnnnnnnnnnnnnnnnnnnnnnnnnnnnnnnnnnnnnnnnnnnnnnnnnnnnnnnnnnnnnnnnnnnnnnnnnnnnnnnnnnnnnnnnnnnnnnnnnnnnnnnnnnnnnnnnnnnnnnnnnnnnnnnnnnnnnnnnnnnnnnnnnnnnnnnnnnnnnnnnnnnnnnnnnnnnnnnnnnnnnnnnnnnnnnnnnnnnnnnnnnnnnnnnnnnnnnnnnnnnnnnnnnnnnnnnnnnnnnnnnnnnnnnnnnnnnnnnnnnnnnnnnnnnnnnnnnnnnnnnnnnnnnnnnnnnnnnnnnnnnnnnnnnnnnnnnnnnnnnnnnnnnnnnnnnnnnnnnnnnnnnnnnnnnnnnnnnnnnnnnnnnnnnnnnnnnnnnnnnnnnnnnnnnnnnnnnnnnnnnnnnnnnnnnnnnnnnnnnnnnnnnnnnnnnnnnnnnnnnnnnnnnnnnnnnnnnnnnnnnnnnnnnnnnnnnnnnnnnnnnnnnnnnnnnnnnnnnnnnnnnnnnnnnnnnnnnnnnnnnnnnnnnnnnnnnnnnnnnnnnnnnnnnnnnnnnnnnnnnnnnnnnnnnnnnnnnnnnnnnnnnnnnnnnnnnnnnnnnnnnnnnnnnnnnnnnnnnnnnnnnnnnnnnnnnnnnnnnnnnnnnnnnnnnnnnnnnnnnnnnnnnnnnnnnnnnnnnnnnnnnnnnnnnnnnnnnnnnnnnnnnnnnnnnnnnnnnnnnnnnnnnnnnnnnnnnnnnnnnnnnnnnnnnnnnnnnnnnnnnnnnnnnnnnnnnnnnnnnnnnnnnnnnnnnnnnnnnnnnnnnnnnnnnnnnnnnnnnnnnnnnnnnnnnnnnnnnnnnnnnnnnnnnnnnnnnnnnnnnnnnnnnnnnnnnnnnnnnnnnnnnnnnnnnnnnnnnnnnnnnnnnnnnnnnnnnnnnnnnnnnnnnnnnnnnnnnnnnnnnnnnnnnnnnnnnnnnnnnnnnnnnnnnnnnnnnnnnnnnnnnnnnnnnnnnnnnnnnnnnnnnnnnnnnnnnnnnnnnnnnnnnnnnnnnnnnnnnnnnnnnnnnnnnnnnnnnnnnnnnnnnnnnnnnnnnnnnnnnnnnnnnnnnnnnnnnnnnnnnnnnnnnnnnnnnnnnnnnnnnnnnnnnnnnnnnnnnnnnnnnnnnnnnnnnnnnnnnnnnnnnnnnnnnnnnnnnnnnnnnnnnnnnnnnnnnnnnnnnnnnnnnnnnnnnnnnnnnnnnnnnnnnnnnnnnnnnnnnnnnnnnnnnnnnnnnnnnnnnnnnnnnnnnnnnnnnnnnnnnnnnnnnnnnnnnnnnnnnnnnnnnnnnnnnnnnnnnnnnnnnnnnnnnnnnnnnnnnnnnnnnnnnnnnnnnnnnnnnnnnnnnnnnnnnnnnnnnnnnnnnnnnnnnnnnnnnnnnnnnnnnnnnnnnnnnnnnnnnnnnnnnnnnnnnnnnnnnnnnnnnnnnnnnnnnnnnnnnnnnnnnnnnnnnnnnnnnnnnnnnnnnnnnnnnnnnnnnnnnnnnnnnnnnnnnnnnnnnnnnnnnnnnnnnnnnnnnnnnnnnnnnnnnnnnnnnnnnnnnnnnnnnnnnnnnnnnnnnnnnnnnnnnnnnnnnnnnnnnnnnnnnnnnnnnnnnnnnnnnnnnnnnnnnnnnnnnnnnnnnnnnnnnnnnnnnnnnnnnnnnnnnnnnnnnnnnnnnnnnnnnnnnnnnnnnnnnnnnnnnnnnnnnnnnnnnnnnnnnnnnnnnnnnnnnnnnnnnnnnnnnnnnnnnnnnnnnnnnnnnnnnnnnnnnnnnnnnnnnnnnnnnnnnnnnnnnnnnnnnnnnnnnnnnnnnnnnnnnnnnnnnnnnnnnnnnnnnnnnnnnnnnnnnnnnnnnnnnnnnnnnnnnnnnnnnnnnnnnnnnnnnnnnnnnnnnnnnnnnnnnnnnnnnnnnnnnnnnnnnnnnnnnnnnnnnnnnnnnnnnnnnnnnnnnnnnnnnnnnnnnnnnnnnnnnnnnnnnnnnnnnnnnnnnnnnnnnnnnnnnnnnnnnnnnnnnnnnnnnnnnnnnnnnnnnnnnnnnnnnnnnnnnnnnnnnnnnnnnnnnnnnnnnnnnnnnnnnnnnnnnnnnnnnnnnnnnnnnnnnnnnnnnnnnnnnnnnnnnnnnnnnnnnnnnnnnnnnnnnnnnnnnnnnnnnnnnnnnnnnnnnnnnnnnnnnnnnnnnnnnnnnnnnnnnnnnnnnnnnnnnnnnnnnnnnnnnnnnnnnnnnnnnnnnnnnnnnnnnnnnnnnnnnnnnnnnnnnnnnnnnnnnnnnnnnnnnnnnnnnnnnnnnnnnnnnnnnnnnnnnnnnnnnnnnnnnnnnnnnnnnnnnnnnnnnnnnnnnnnnnnnnnnnnnnnnnnnnnnnnnnnnnnnnnnnnnnnnnnnnnnnnnnnnnnnnnnnnnnnnnnnnnnnnnnnnnnnnnnnnnnnnnnnnnnnnnnnnnnnnnnnnnnnnnnnnnnnnnnnnnnnnnnnnnnnnnnnnnnnnnnnnnnnnnnnnnnnnnnnnnnnnnnnnnnnnnnnnnnnnnnnnnnnnnnnnnnnnnnnnnnnnnnnnnnnnnnnnnnnnnnnnnnnnnnnnnnnnnnnnnnnnnnnnnnnnnnnnnnnnnnnnnnnnnnnnnnnnnnnnnnnnnnnnnnnnnnnnnnnnnnnnnnnnnnnnnnnnnnnnnnnnnnnnnnnnnnnnnnnnnnnnnnnnnnnnnnnnnnnnnnnnnnnnnnnnnnnnnnnnnnnnnnnnnnnnnnnnnnnnnnnnnnnnnnnnnnnnnnnnnnnnnnnnnnnnnnnnnnnnnnnnnnnnnnnnnnnnnnnnnnnnnnnnnnnnnnnnnnnnnnnnnnnnnnnnnnnnnnnnnnnnnnnnnnnnnnnnnnnnnnnnnnnnnnnnnnnnnnnnnnnnnnnnnnnnnnnnnnnnnnnnnnnnnnnnnnnnnnnnnnnnnnnnnnnnnnnnnnnnnnnnnnnnnnnnnnnnnnnnnnnnnnnnnnnnnnnnnnnnnnnnnnnnnnnnnnnnnnnnnnnnnnnnnnnnnnnnnnnnnnnnnnnnnnnnnnnnnnnnnnnnnnnnnnnnnnnnnnnnnnnnnnnnnnnnnnnnnnnnnnnnnnnnnnnnnnnnnnnnnnnnnnnnnnnnnnnnnnnnnnnnnnnnnnnnnnnnnnnnnnnnnnnnnnnnnnnnnnnnnnnnnnnnnnnnnnnnnnnnnnnnnnnnnnnnnnnnnnnnnnnnnnnnnnnnnnnnnnnnnnnnnnnnnnnnnnnnnnnnnnnnnnnnnnnnnnnnnnnnnnnnnnnnnnnnnnnnnnnnnnnnnnnnnnnnnnnnnnnnnnnnnnnnnnnnnnnnnnnnnnnnnnnnnnnnnnnnnnnnnnnnnnnnnnnnnnnnnnnnnnnnnnnnnnnnnnnnnnnnnnnnnnnnnnnnnnnnnnnnnnnnnnnnnnnnnnnnnnnnnnnnnnnnnnnnnnnnnnnnnnnnnnnnnnnnnnnnnnnnnnnnnnnnnnnnnnnnnnnnnnnnnnnnnnnnnnnnnnnnnnnnnnnnnnnnnnnnnnnnnnnnnnnnnnnnnnnnnnnnnnnnnnnnnnnnnnnnnnnnnnnnnnnnnnnnnnnnnnnnnnnnnnnnnnnnnnnnnnnnnnnnnnnnnnnnnnnnnnnnnnnnnnnnnnnnnnnnnnnnnnnnnnnnnnnnnnnnnnnnnnnnnnnnnnnnnnnnnnnnnnnnnnnnnnnnnnnnnnnnnnnnnnnnnnnnnnnnnnnnnnnnnnnnnnnnnnnnnnnnnnnnnnnnnnnnnnnnnnnnnnnnnnnnnnnnnnnnnnnnnnnnnnnnnnnnnnnnnnnnnnnnnnnnnnnnnnnnnnnnnnnnnnnnnnnnnnnnnnnnnnnnnnnnnnnnnnnnnnnnnnnnnnnnnnnnnnnnnnnnnnnnnnnnnnnnnnnnnnnnnnnnnnnnnnnnnnnnnnnnnnnnnnnnnnnnnnnnnnnnnnnnnnnnnnnnnnnnnnnnnnnnnnnnnnnnnnnnnnnnnnnnnnnnnnnnnnnnnnnnnnnnnnnnnnnnnnnnnnnnnnnnnnnnnnnnnnnnnnnnnnnnnnnnnnnnnnnnnnnnnnnnnnnnnnnnnnnnnnnnnnnnnnnnnnnnnnnnnnnnnnnnnnnnnnnnnnnnnnnnnnnnnnnnnnnnnnnnnnnnnnnnnnnnnnnnnnnnnnnnnnnnnnnnnnnnnnnnnnnnnnnnnnnnnnnnnnnnnnnnnnnnnnnnnnnnnnnnnnnnnnnnnnnnnnnnnnnnnnnnnnnnnnnnnnnnnnnnnnnnnnnnnnnnnnnnnnnnnnnnnnnnnnnnnnnnnnnnnnnnnnnnnnnnnnnnnnnnnnnnnnnnnnnnnnnnnnnnnnnnnnnnnnnnnnnnnnnnnnnnnnnnnnnnnnnnnnnnnnnnnnnnnnnnnnnnnnnnnnnnnnnnnnnnnnnnnnnnnnnnnnnnnnnnnnnnnnnnnnnnnnnnnnnnnnnnnnnnnnnnnnnnnnnnnnnnnnnnnnnnnnnnnnnnnnnnnnnnnnnnnnnnnnnnnnnnnnnnnnnnnnnnnnnnnnnnnnnnnnnnnnnnnnnnnnnnnnnnnnnnnnnnnnnnnnnnnnnnnnnnnnnnnnnnnnnnnnnnnnnnnnnnnnnnnnnnnnnnnnnnnnnnnnnnnnnnnnnnnnnnnnnnnnnnnnnnnnnnnnnnnnnnnnnnnnnnnnnnnnnnnnnnnnnnnnnnnnnnnnnnnnnnnnnnnnnnnnnnnnnnnnnnnnnnnnnnnnnnnnnnnnnnnnnnnnnnnnnnnnnnnnnnnnnnnnnnnnnnnnnnnnnnnnnnnnnnnnnnnnnnnnnnnnnnnnnnnnnnnnnnnnnnnnnnnnnnnnnnnnnnnnnnnnnnnnnnnnnnnnnnnnnnnnnnnnnnnnnnnnnnnnnnnnnnnnnnnnnnnnnnnnnnnnnnnnnnnnnnnnnnnnnnnnnnnnnnnnnnnnnnnnnnnnnnnnnnnnnnnnnnnnnnnnnnnnnnnnnnnnnnnnnnnnnnnnnnnnnnnnnnnnnnnnnnnnnnnnnnnnnnnnnnnnnnnnnnnnnnnnnnnnnnnnnnnnnnnnnnnnnnnnnnnnnnnnnnnnnnnnnnnnnnnnnnnnnnnnnnnnnnnnnnnnnnnnnnnnnnnnnnnnnnnnnnnnnnnnnnnnnnnnnnnnnnnnnnnnnnnnnnnnnnnnnnnnnnnnnnnnnnnnnnnnnnnnnnnnnnnnnnnnnnnnnnnnnnnnnnnnnnnnnnnnnnnnnnnnnnnnnnnnnnnnnnnnnnnnnnnnnnnnnnnnnnnnnnnnnnnnnnnnnnnnnnnnnnnnnnnnnnnnnnnnnnnnnnnnnnnnnnnnnnnnnnnnnnnnnnnnnnnnnnnnnnnnnnnnnnnnnnnnnnnnnnnnnnnnnnnnnnnnnnnnnnnnnnnnnnnnnnnnnnnnnnnnnnnnnnnnnnnnnnnnnnnnnnnnnnnnnnnnnnnnnnnnnnnnnnnnnnnnnnnnnnnnnnnnnnnnnnnnnnnnnnnnnnnnnnnnnnnnnnnnnnnnnnnnnnnnnnnnnnnnnnnnnnnnnnnnnnnnnnnnnnnnnnnnnnnnnnnnnnnnnnnnnnnnnnnnnnnnnnnnnnnnnnnnnnnnnnnnnnnnnnnnnnnnnnnnnnnnnnnnnnnnnnnnnnnnnnnnnnnnnnnnnnnnnnnnnnnnnnnnnnnnnnnnnnnnnnnnnnnnnnnnnnnnnnnnnnnnnnnnnnnnnnnnnnnnnnnnnnnnnnnnnnnnnnnnnnnnnnnnnnnnnnnnnnnnnnnnnnnnnnnnnnnnnnnnnnnnnnnnnnnnnnnnnnnnnnnnnnnnnnnnnnnnnnnnnnnnnnnnnnnnnnnnnnnnnnnnnnnnnnnnnnnnnnnnnnnnnnnnnnnnnnnnnnnnnnnnnnnnnnnnnnnnnnnnnnnnnnnnnnnnnnnnnnnnnnnnnnnnnnnnnnnnnnnnnnnnnnnnnnnnnnnnnnnnnnnnnnnnnnnnnnnnnnnnnnnnnnnnnnnnnnnnnnnnnnnnnnnnnnnnnnnnnnnnnnnnnnnnnnnnnnnnnnnnnnnnnnnnnnnnnnnnnnnnnnnnnnnnnnnnnnnnnnnnnnnnnnnnnnnnnnnnnnnnnnnnnnnnnnnnnnnnnnnnnnnnnnnnnnnnnnnnnnnnnnnnnnnnnnnnnnnnnnnnnnnnnnnnnnnnnnnnnnnnnnnnnnnnnnnnnnnnnnnnnnnnnnnnnnnnnnnnnnnnnnnnnnnnnnnnnnnnnnnnnnnnnnnnnnnnnnnnnnnnnnnnnnnnnnnnnnnnnnnnnnnnnnnnnnnnnnnnnnnnnnnnnnnnnnnnnnnnnnnnnnnnnnnnnnnnnnnnnnnnnnnnnnnnnnnnnnnnnnnnnnnnnnnnnnnnnnnnnnnnnnnnnnnnnnnnnnnnnnnnnnnnnnnnnnnnnnnnnnnnnnnnnnnnnnnnnnnnnnnnnnnnnnnnnnnnnnnnnnnnnnnnnnnnnnnnnnnnnnnnnnnnnnnnnnnnnnnnnnnnnnnnnnnnnnnnnnnnnnnnnnnnnnnnnnnnnnnnnnnnnnnnnnnnnnnnnnnnnnnnnnnnnnnnnnnnnnnnnnnnnnnnnnnnnnnnnnnnnnnnnnnnnnnnnnnnnnnnnnnnnnnnnnnnnnnnnnnnnnnnnnnnnnnnnnnnnnnnnnnnnnnnnnnnnnnnnnnnnnnnnnnnnnnnnnnnnnnnnnnnnnnnnnnnnnnnnnnnnnnnnnnnnnnnnnnnnnnnnnnnnnnnnnnnnnnnnnnnnnnnnnnnnnnnnnnnnnnnnnnnnnnnnnnnnnnnnnnnnnnnnnnnnnnnnnnnnnnnnnnnnnnnnnnnnnnnnnnnnnnnnnnnnnnnnnnnnnnnnnnnnnnnnnnnnnnnnnnnnnnnnnnnnnnnnnnnnnnnnnnnnnnnnnnnnnnnnnnnnnnnnnnnnnnnnnnnnnnnnnnnnnnnnnnnnnnnnnnnnnnnnnnnnnnnnnnnnnnnnnnnnnnnnnnnnnnnnnnnnnnnnnnnnnnnnnnnnnnnnnnnnnnnnnnnnnnnnnnnnnnnnnnnnnnnnnnnnnnnnnnnnnnnnnnnnnnnnnnnnnnnnnnnnnnnnnnnnnnnnnnnnnnnnnnnnnnnnnnnnnnnnnnnnnnnnnnnnnnnnnnnnnnnnnnnnnnnnnnnnnnnnnnnnnnnnnnnnnnnnnnnnnnnnnnnnnnnnnnnnnnnnnnnnnnnnnnnnnnnnnnnnnnnnnnnnnnnnnnnnnnnnnnnnnnnnnnnnnnnnnnnnnnnnnnnnnnnnnnnnnnnnnnnnnnnnnnnnnnnnnnnnnnnnnnnnnnnnnnnnnnnnnnnnnnnnnnnnnnnnnnnnnnnnnnnnnnnnnnnnnnnnnnnnnnnnnnnnnnnnnnnnnnnnnnnnnnnnnnnnnnnnnnnnnnnnnnnnnnnnnnnnnnnnnnnnnnnnnnnnnnnnnnnnnnnnnnnnnnnnnnnnnnnnnnnnnnnnnnnnnnnnnnnnnnnnnnnnnnnnnnnnnnnnnnnnnnnnnnnnnnnnnnnnnnnnnnnnnnnnnnnnnnnnnnnnnnnnnnnnnnnnnnnnnnnnnnnnnnnnnnnnnnnnnnnnnnnnnnnnnnnnnnnnnnnnnnnnnnnnnnnnnnnnnnnnnnnnnnnnnnnnnnnnnnnnnnnnnnnnnnnnnnnnnnnnnnnnnnnnnnnnnnnnnnnnnnnnnnnnnnnnnnnnnnnnnnnnnnnnnnnnnnnnnnnnnnnnnnnnnnnnnnnnnnnnnnnnnnnnnnnnnnnnnnnnnnnnnnnnnnnnnnnnnnnnnnnnnnnnnnnnnnnnnnnnnnnnnnnnnnnnnnnnnnnnnnnnnnnnnnnnnnnnnnnnnnnnnnnnnnnnnnnnnnnnnnnnnnnnnnnnnnnnnnnnnnnnnnnnnnnnnnnnnnnnnnnnnnnnnnnnnnnnnnnnnnnnnnnnnnnnnnnnnnnnnnnnnnnnnnnnnnnnnnnnnnnnnnnnnnnnnnnnnnnnnnnnnnnnnnnnnnnnnnnnnnnnnnnnnnnnnnnnnnnnnnnnnnnnnnnnnnnnnnnnnnnnnnnnnnnnnnnnnnnnnnnnnnnnnnnnnnnnnnnnnnnnnnnnnnnnnnnnnnnnnnnnnnnnnnnnnnnnnnnnnnnnnnnnnnnnnnnnnnnnnnnnnnnnnnnnnnnnnnnnnnnnnnnnnnnnnnnnnnnnnnnnnnnnnnnnnnnnnnnnnnnnnnnnnnnnnnnnnnnnnnnnnnnnnnnnnnnnnnnnnnnnnnnnnnnnnnnnnnnnnnnnnnnnnnnnnnnnnnnnnnnnnnnnnnnnnnnnnnnnnnnnnnnnnnnnnnnnnnnnnnnnnnnnnnnnnnnnnnnnnnnnnnnnnnnnnnnnnnnnnnnnnnnnnnnnnnnnnnnnnnnnnnnnnnnnnnnnnnnnnnnnnnnnnnnnnnnnnnnnnnnnnnnnnnnnnnnnnnnnnnnnnnnnnnnnnnnnnnnnnnnnnnnnnnnnnnnnnnnnnnnnnnnnnnnnnnnnnnnnnnnnnnnnnnnnnnnnnnnnnnnnnnnnnnnnnnnnnnnnnnnnnnnnnnnnnnnnnnnnnnnnnnnnnnnnnnnnnnnnnnnnnnnnnnnnnnnnnnnnnnnnnnnnnnnnnnnnnnnnnnnnnnnnnnnnnnnnnnnnnnnnnnnnnnnnnnnnnnnnnnnnnnnnnnnnnnnnnnnnnnnnnnnnnnnnnnnnnnnnnnnnnnnnnnnnnnnnnnnnnnnnnnnnnnnnnnnnnnnnnnnnnnnnnnnnnnnnnnnnnnnnnnnnnnnnnnnnnnnnnnnnnnnnnnnnnnnnnnnnnnnnnnnnnnnnnnnnnnnnnnnnnnnnnnnnnnnnnnnnnnnnnnnnnnnnnnnnnnnnnnnnnnnnnnnnnnnnnnnnnnnnnnnnnnnnnnnnnnnnnnnnnnnnnnnnnnnnnnnnnnnnnnnnnnnnnnnnnnnnnnnnnnnnnnnnnnnnnnnnnnnnnnnnnnnnnnnnnnnnnnnnnnnnnnnnnnnnnnnnnnnnnnnnnnnnnnnnnnnnnnnnnnnnnnnnnnnnnnnnnnnnnnnnnnnnnnnnnnnnnnnnnnnnnnnnnnnnnnnnnnnnnnnnnnnnnnnnnnnnnnnnnnnnnnnnnnnnnnnnnnnnnnnnnnnnnnnnnnnnnnnnnnnnnnnnnnnnnnnnnnnnnnnnnnnnnnnnnnnnnnnnnnnnnnnnnnnnnnnnnnnnnnnnnnnnnnnnnnnnnnnnnnnnnnnnnnnnnnnnnnnnnnnnnnnnnnnnnnnnnnnnnnnnnnnnnnnnnnnnnnnnnnnnnnnnnnnnnnnnnnnnnnnnnnnnnnnnnnnnnnnnnnnnnnnnnnnnnnnnnnnnnnnnnnnnnnnnnnnnnnnnnnnnnnnnnnnnnnnnnnnnnnnnnnnnnnnnnnnnnnnnnnnnnnnnnnnnnnnnnnnnnnnnnnnnnnnnnnnnnnnnnnnnnnnnnnnnnnnnnnnnnnnnnnnnnnnnnnnnnnnnnnnnnnnnnnnnnnnnnnnnnnnnnnnnnnnnnnnnnnnnnnnnnnnnnnnnnnnnnnnnnnnnnnnnnnnnnnnnnnnnnnnnnnnnnnnnnnnnnnnnnnnnnnnnnnnnnnnnnnnnnnnnnnnnnnnnnnnnnnnnnnnnnnnnnnnnnnnnnnnnnnnnnnnnnnnnnnnnnnnnnnnnnnnnnnnnnnnnnnnnnnnnnnnnnnnnnnnnnnnnnnnnnnnnnnnnnnnnnnnnnnnnnnnnnnnnnnnnnnnnnnnnnnnnnnnnnnnnnnnnnnnnnnnnnnnnnnnnnnnnnnnnnnnnnnnnnnnnnnnnnnnnnnnnnnnnnnnnnnnnnnnnnnnnnnnnnnnnnnnnnnnnnnnnnnnnnnnnnnnnnnnnnnnnnnnnnnnnnnnnnnnnnnnnnnnnnnnnnnnnnnnnnnnnnnnnnnnnnnnnnnnnnnnnnnnnnnnnnnnnnnnnnnnnnnnnnnnnnnnnnnnnnnnnnnnnnnnnnnnnnnnnnnnnnnnnnnnnnnnnnnnnnnnnnnnnnnnnnnnnnnnnnnnnnnnnnnnnnnnnnnnnnnnnnnnnnnnnnnnnnnnnnnnnnnnnnnnnnnnnnnnnnnnnnnnnnnnnnnnnnnnnnnnnnnnnnnnnnnnnnnnnnnnnnnnnnnnnnnnnnnnnnnnnnnnnnnnnnnnnnnnnnnnnnnnnnnnnnnnnnnnnnnnnnnnnnnnnnnnnnnnnnnnnnnnnnnnnnnnnnnnnnnnnnnnnnnnnnnnnnnnnnnnnnnnnnnnnnnnnnnnnnnnnnnnnnnnnnnnnnnnnnnnnnnnnnnnnnnnnnnnnnnnnnnnnnnnnnnnnnnnnnnnnnnnnnnnnnnnnnnnnnnnnnnnnnnnnnnnnnnnnnnnnnnnnnnnnnnnnnnnnnnnnnnnnnnnnnnnnnnnnnnnnnnnnnnnnnnnnnnnnnnnnnnnnnnnnnnnnnnnnnnnnnnnnnnnnnnnnnnnnnnnnnnnnnnnnnnnnnnnnnnnnnnnnnnnnnnnnnnnnnnnnnnnnnnnnnnnnnnnnnnnnnnnnnnnnnnnnnnnnnnnnnnnnnnnnnnnnnnnnnnnnnnnnnnnnnnnnnnnnnnnnnnnnnnnnnnnnnnnnnnnnnnnnnnnnnnnnnnnnnnnnnnnnnnnnnnnnnnnnnnnnnnnnnnnnnnnnnnnnnnnnnnnnnnnnnnnnnnnnnnnnnnnnnnnnnnnnnnnnnnnnnnnnnnnnnnnnnnnnnnnnnnnnnnnnnnnnnnnnnnnnnnnnnnnnnnnnnnnnnnnnnnnnnnnnnnnnnnnnnnnnnnnnnnnnnnnnnnnnnnnnnnnnnnnnnnnnnnnnnnnnnnnnnnnnnnnnnnnnnnnnnnnnnnnnnnnnnnnnnnnnnnnnnnnnnnnnnnnnnnnnnnnnnnnnnnnnnnnnnnnnnnnnnnnnnnnnnnnnnnnnnnnnnnnnnnnnnnnnnnnnnnnnnnnnnnnnnnnnnnnnnnnnnnnnnnnnnnnnnnnnnnnnnnnnnnnnnnnnnnnnnnnnnnnnnnnnnnnnnnnnnnnnnnnnnnnnnnnnnnnnnnnnnnnnnnnnnnnnnnnnnnnnnnnnnnnnnnnnnnnnnnnnnnnnnnnnnnnnnnnnnnnnnnnnnnnnnnnnnnnnnnnnnnnnnnnnnnnnnnnnnnnnnnnnnnnnnnnnnnnnnnnnnnnnnnnnnnnnnnnnnnnnnnnnnnnnnnnnnnnnnnnnnnnnnnnnnnnnnnnnnnnnnnnnnnnnnnnnnnnnnnnnnnnnnnnnnnnnnnnnnnnnnnnnnnnnnnnnnnnnnnnnnnnnnnnnnnnnnnnnnnnnnnnnnnnnnnnnnnnnnnnnnnnnnnnnnnnnnnnnnnnnnnnnnnnnnnnnnnnnnnnnnnnnnnnnnnnnnnnnnnnnnnnnnnnnnnnnnnnnnnnnnnnnnnnnnnnnnnnnnnnnnnnnnnnnnnnnnnnnnnnnnnnnnnnnnnnnnnnnnnnnnnnnnnnnnnnnnnnnnnnnnnnnnnnnnnnnnnnnnnnnnnnnnnnnnnnnnnnnnnnnnnnnnnnnnnnnnnnnnnnnnnnnnnnnnnnnnnnnnnnnnnnnnnnnnnnnnnnnnnnnnnnnnnnnnnnnnnnnnnnnnnnnnnnnnnnnnnnnnnnnnnnnnnnnnnnnnnnnnnnnnnnnnnnnnnnnnnnnnnnnnnnnnnnnnnnnnnnnnnnnnnnnnnnnnnnnnnnnnnnnnnnnnnnnnnnnnnnnnnnnnnnnnnnnnnnnnnnnnnnnnnnnnnnnnnnnnnnnnnnnnnnnnnnnnnnnnnnnnnnnnnnnnnnnnnnnnnnnnnnnnnnnnnnnnnnnnnnnnnnnnnnnnnnnnnnnnnnnnnnnnnnnnnnnnnnnnnnnnnnnnnnnnnnnnnnnnnnnnnnnnnnnnnnnnnnnnnnnnnnnnnnnnnnnnnnnnnnnnnnnnnnnnnnnnnnnnnnnnnnnnnnnnnnnnnnnnnnnnnnnnnnnnnnnnnnnnnnnnnnnnnnnnnnnnnnnnnnnnnnnnnnnnnnnnnnnnnnnnnnnnnnnnnnnnnnnnnnnnnnnnnnnnnnnnnnnnnnnnnnnnnnnnnnnnnnnnnnnnnnnnnnnnnnnnnnnnnnnnnnnnnnnnnnnnnnnnnnnnnnnnnnnnnnnnnnnnnnnnnnnnnnnnnnnnnnnnnnnnnnnnnnnnnnnnnnnnnnnnnnnnnnnnnnnnnnnnnnnnnnnnnnnnnnnnnnnnnnnnnnnnnnnnnnnnnnnnnnnnnnnnnnnnnnnnnnnnnnnnnnnnnnnnnnnnnnnnnnnnnnnnnnnnnnnnnnnnnnnnnnnnnnnnnnnnnnnnnnnnnnnnnnnnnnnnnnnnnnnnnnnnnnnnnnnnnnnnnnnnnnnnnnnnnnnnnnnnnnnnnnnnnnnnnnnnnnnnnnnnnnnnnnnnnnnnnnnnnnnnnnnnnnnnnnnnnnnnnnnnnnnnnnnnnnnnnnnnnnnnnnnnnnnnnnnnnnnnnnnnnnnnnnnnnnnnnnnnnnnnnnnnnnnnnnnnnnnnnnnnnnnnnnnnnnnnnnnnnnnnnnnnnnnnnnnnnnnnnnnnnnnnnnnnnnnnnnnnnnnnnnnnnnnnnnnnnnnnnnnnnnnnnnnnnnnnnnnnnnnnnnnnnnnnnnnnnnnnnnnnnnnnnnnnnnnnnnnnnnnnnnnnnnnnnnnnnnnnnnnnnnnnnnnnnnnnnnnnnnnnnnnnnnnnnnnnnnnnnnnnnnnnnnnnnnnnnnnnnnnnnnnnnnnnnnnnnnnnnnnnnnnnnnnnnnnnnnnnnnnnnnnnnnnnnnnnnnnnnnnnnnnnnnnnnnnnnnnnnnnnnnnnnnnnnnnnnnnnnnnnnnnnnnnnnnnnnnnnnnnnnnnnnnnnnnnnnnnnnnnnnnnnnnnnnnnnnnnnnnnnnnnnnnnnnnnnnnnnnnnnnnnnnnnnnnnnnnnnnnnnnnnnnnnnnnnnnnnnnnnnnnnnnnnnnnnnnnnnnnnnnnnnnnnnnnnnnnnnnnnnnnnnnnnnnnnnnnnnnnnnnnnnnnnnnnnnnnnnnnnnnnnnnnnnnnnnnnnnnnnnnnnnnnnnnnnnnnnnnnnnnnnnnnnnnnnnnnnnnnnnnnnnnnnnnnnnnnnnnnnnnnnnnnnnnnnnnnnnnnnnnnnnnnnnnnnnnnnnnnnnnnnnnnnnnnnnnnnnnnnnnnnnnnnnnnnnnnnnnnnnnnnnnnnnnnnnnnnnnnnnnnnnnnnnnnnnnnnnnnnnnnnnnnnnnnnnnnnnnnnnnnnnnnnnnnnnnnnnnnnnnnnnnnnnnnnnnnnnnnnnnnnnnnnnnnnnnnnnnnnnnnnnnnnnnnnnnnnnnnnnnnnnnnnnnnnnnnnnnnnnnnnnnnnnnnnnnnnnnnnnnnnnnnnnnnnnnnnnnnnnnnnnnnnnnnnnnnnnnnnnnnnnnnnnnnnnnnnnnnnnnnnnnnnnnnnnnnnnnnnnnnnnnnnnnnnnnnnnnnnnnnnnnnnnnnnnnnnnnnnnnnnnnnnnnnnnnnnnnnnnnnnnnnnnnnnnnnnnnnnnnnnnnnnnnnnnnnnnnnnnnnnnnnnnnnnnnnnnnnnnnnnnnnnnnnnnnnnnnnnnnnnnnnnnnnnnnnnnnnnnnnnnnnnnnnnnnnnnnnnnnnnnnnnnnnnnnnnnnnnnnnnnnnnnnnnnnnnnnnnnnnnnnnnnnnnnnnnnnnnnnnnnnnnnnnnnnnnnnnnnnnnnnnnnnnnnnnnnnnnnnnnnnnnnnnnnnnnnnnnnnnnnnnnnnnnnnnnnnnnnnnnnnnnnnnnnnnnnnnnnnnnnnnnnnnnnnnnnnnnnnnnnnnnnnnnnnnnnnnnnnnnnnnnnnnnnnnnnnnnnnnnnnnnnnnnnnnnnnnnnnnnnnnnnnnnnnnnnnnnnnnnnnnnnnnnnnnnnnnnnnnnnnnnnnnnnnnnnnnnnnnnnnnnnnnnnnnnnnnnnnnnnnnnnnnnnnnnnnnnnnnnnnnnnnnnnnnnnnnnnnnnnnnnnnnnnnnnnnnnnnnnnnnnnnnnnnnnnnnnnnnnnnnnnnnnnnnnnnnnnnnnnnnnnnnnnnnnnnnnnnnnnnnnnnnnnnnnnnnnnnnnnnnnnnnnnnnnnnnnnnnnnnnnnnnnnnnnnnnnnnnnnnnnnnnnnnnnnnnnnnnnnnnnnnnnnnnnnnnnnnnnnnnnnnnnnnnnnnnnnnnnnnnnnnnnnnnnnnnnnnnnnnnnnnnnnnnnnnnnnnnnnnnnnnnnnnnnnnnnnnnnnnnnnnnnnnnnnnnnnnnnnnnnnnnnnnnnnnnnnnnnnnnnnnnnnnnnnnnnnnnnnnnnnnnnnnnnnnnnnnnnnnnnnnnnnnnnnnnnnnnnnnnnnnnnnnnnnnnnnnnnnnnnnnnnnnnnnnnnnnnnnnnnnnnnnnnnnnnnnnnnnnnnnnnnnnnnnnnnnnnnnnnnnnnnnnnnnnnnnnnnnnnnnnnnnnnnnnnnnnnnnnnnnnnnnnnnnnnnnnnnnnnnnnnnnnnnnnnnnnnnnnnnnnnnnnnnnnnnnnnnnnnnnnnnnnnnnnnnnnnnnnnnnnnnnnnnnnnnnnnnnnnnnnnnnnnnnnnnnnnnnnnnnnnnnnnnnnnnnnnnnnnnnnnnnnnnnnnnnnnnnnnnnnnnnnnnnnnnnnnnnnnnnnnnnnnnnnnnnnnnnnnnnnnnnnnnnnnnnnnnnnnnnnnnnnnnnnnnnnnnnnnnnnnnnnnnnnnnnnnnnnnnnnnnnnnnnnnnnnnnnnnnnnnnnnnnnnnnnnnnnnnnnnnnnnnnnnnnnnnnnnnnnnnnnnnnnnnnnnnnnnnnnnnnnnnnnnnnnnnnnnnnnnnnnnnnnnnnnnnnnnnnnnnnnnnnnnnnnnnnnnnnnnnnnnnnnnnnnnnnnnnnnnnnnnnnnnnnnnnnnnnnnnnnnnnnnnnnnnnnnnnnnnnnnnnnnnnnnnnnnnnnnnnnnnnnnnnnnnnnnnnnnnnnnnnnnnnnnnnnnnnnnnnnnnnnnnnnnnnnnnnnnnnnnnnnnnnnnnnnnnnnnnnnnnnnnnnnnnnnnnnnnnnnnnnnnnnnnnnnnnnnnnnnnnnnnnnnnnnnnnnnnnnnnnnnnnnnnnnnnnnnnnnnnnnnnnnnnnnnnnnnnnnnnnnnnnnnnnnnnnnnnnnnnnnnnnnnnnnnnnnnnnnnnnnnnnnnnnnnnnnnnnnnnnnnnnnnnnnnnnnnnnnnnnnnnnnnnnnnnnnnnnnnnnnnnnnnnnnnnnnnnnnnnnnnnnnnnnnnnnnnnnnnnnnnnnnnnnnnnnnnnnnnnnnnnnnnnnnnnnnnnnnnnnnnnnnnnnnnnnnnnnnnnnnnnnnnnnnnnnnnnnnnnnnnnnnnnnnnnnnnnnnnnnnnnnnnnnnnnnnnnnnnnnnnnnnnnnnnnnnnnnnnnnnnnnnnnnnnnnnnnnnnnnnnnnnnnnnnnnnnnnnnnnnnnnnnnnnnnnnnnnnnnnnnnnnnnnnnnnnnnnnnnnnnnnnnnnnnnnnnnnnnnnnnnnnnnnnnnnnnnnnnnnnnnnnnnnnnnnnnnnnnnnnnnnnnnnnnnnnnnnnnnnnnnnnnnnnnnnnnnnnnnnnnnnnnnnnnnnnnnnnnnnnnnnnnnnnnnnnnnnnnnnnnnnnnnnnnnnnnnnnnnnnnnnnnnnnnnnnnnnnnnnnnnnnnnnnnnnnnnnnnnnnnnnnnnnnnnnnnnnnnnnnnnnnnnnnnnnnnnnnnnnnnnnnnnnnnnnnnnnnnnnnnnnnnnnnnnnnnnnnnnnnnnnnnnnnnnnnnnnnnnnnnnnnnnnnnnnnnnnnnnnnnnnnnnnnnnnnnnnnnnnnnnnnnnnnnnnnnnnnnnnnnnnnnnnnnnnnnnnnnnnnnnnnnnnnnnnnnnnnnnnnnnnnnnnnnnnnnnnnnnnnnnnnnnnnnnnnnnnnnnnnnnnnnnnnnnnnnnnnnnnnnnnnnnnnnnnnnnnnnnnnnnnnnnnnnnnnnnnnnnnnnnnnnnnnnnnnnnnnnnnnnnnnnnnnnnnnnnnnnnnnnnnnnnnnnnnnnnnnnnnnnnnnnnnnnnnnnnnnnnnnnnnnnnnnnnnnnnnnnnnnnnnnnnnnnnnnnnnnnnnnnnnnnnnnnnnnnnnnnnnnnnnnnnnnnnnnnnnnnnnnnnnnnnnnnnnnnnnnnnnnnnnnnnnnnnnnnnnnnnnnnnnnnnnnnnnnnnnnnnnnnnnnnnnnnnnnnnnnnnnnnnnnnnnnnnnnnnnnnnnnnnnnnnnnnnnnnnnnnnnnnnnnnnnnnnnnnnnnnnnnnnnnnnnnnnnnnnnnnnnnnnnnnnnnnnnnnnnnnnnnnnnnnnnnnnnnnnnnnnnnnnnnnnnnnnnnnnnnnnnnnnnnnnnnnnnnnnnnnnnnnnnnnnnnnnnnnnnnnnnnnnnnnnnnnnnnnnnnnnnnnnnnnnnnnnnnnnnnnnnnnnnnnnnnnnnnnnnnnnnnnnnnnnnnnnnnnnnnnnnnnnnnnnnnnnnnnnnnnnnnnnnnnnnnnnnnnnnnnnnnnnnnnnnnnnnnnnnnnnnnnnnnnnnnnnnnnnnnnnnnnnnnnnnnnnnnnnnnnnnnnnnnnnnnnnnnnnnnnnnnnnnnnnnnnnnnnnnnnnnnnnnnnnnnnnnnnnnnnnnnnnnnnnnnnnnnnnnnnnnnnnnnnnnnnnnnnnnnnnnnnnnnnnnnnnnnnnnnnnnnnnnnnnnnnnnnnnnnnnnnnnnnnnnnnnnnnnnnnnnnnnnnnnnnnnnnnnnnnnnnnnnnnnnnnnnnnnnnnnnnnnnnnnnnnnnnnnnnnnnnnnnnnnnnnnnnnnnnnnnnnnnnnnnnnnnnnnnnnnnnnnnnnnnnnnnnnnnnnnnnnnnnnnnnnnnnnnnnnnnnnnnnnnnnnnnnnnnnnnnnnnnnnnnnnnnnnnnnnnnnnnnnnnnnnnnnnnnnnnnnnnnnnnnnnnnnnnnnnnnnnnnnnnnnnnnnnnnnnnnnnnnnnnnnnnnnnnnnnnnnnnnnnnnnnnnnnnnnnnnnnnnnnnnnnnnnnnnnnnnnnnnnnnnnnnnnnnnnnnnnnnnnnnnnnnnnnnnnnnnnnnnnnnnnnnnnnnnnnnnnnnnnnnnnnnnnnnnnnnnnnnnnnnnnnnnnnnnnnnnnnnnnnnnnnnnnnnnnnnnnnnnnnnnnnnnnnnnnnnnnnnnnnnnnnnnnnnnnnnnnnnnnnnnnnnnnnnnnnnnnnnnnnnnnnnnnnnnnnnnnnnnnnnnnnnnnnnnnnnnnnnnnnnnnnnnnnnnnnnnnnnnnnnnnnnnnnnnnnnnnnnnnnnnnnnnnnnnnnnnnnnnnnnnnnnnnnnnnnnnnnnnnnnnnnnnnnnnnnnnnnnnnnnnnnnnnnnnnnnnnnnnnnnnnnnnnnnnnnnnnnnnnnnnnnnnnnnnnnnnnnnnnnnnnnnnnnnnnnnnnnnnnnnnnnnnnnnnnnnnnnnnnnnnnnnnnnnnnnnnnnnnnnnnnnnnnnnnnnnnnnnnnnnnnnnnnnnnnnnnnnnnnnnnnnnnnnnnnnnnnnnnnnnnnnnnnnnnnnnnnnnnnnnnnnnnnnnnnnnnnnnnnnnnnnnnnnnnnnnnnnnnnnnnnnnnnnnnnnnnnnnnnnnnnnnnnnnnnnnnnnnnnnnnnnnnnnnnnnnnnnnnnnnnnnnnnnnnnnnnnnnnnnnnnnnnnnnnnnnnnnnnnnnnnnnnnnnnnnnnnnnnnnnnnnnnnnnnnnnnnnnnnnnnnnnnnnnnnnnnnnnnnnnnnnnnnnnnnnnnnnnnnnnnnnnnnnnnnnnnnnnnnnnnnnnnnnnnnnnnnnnnnnnnnnnnnnnnnnnnnnnnnnnnnnnnnnnnnnnnnnnnnnnnnnnnnnnnnnnnnnnnnnnnnnnnnnnnnnnnnnnnnnnnnnnnnnnnnnnnnnnnnnnnnnnnnnnnnnnnnnnnnnnnnnnnnnnnnnnnnnnnnnnnnnnnnnnnnnnnnnnnnnnnnnnnnnnnnnnnnnnnnnnnnnnnnnnnnnnnnnnnnnnnnnnnnnnnnnnnnnnnnnnnnnnnnnnnnnnnnnnnnnnnnnnnnnnnnnnnnnnnnnnnnnnnnnnnnnnnnnnnnnnnnnnnnnnnnnnnnnnnnnnnnnnnnnnnnnnnnnnnnnnnnnnnnnnnnnnnnnnnnnnnnnnnnnnnnnnnnnnnnnnnnnnnnnnnnnnnnnnnnnnnnnnnnnnnnnnnnnnnnnnnnnnnnnnnnnnnnnnnnnnnnnnnnnnnnnnnnnnnnnnnnnnnnnnnnnnnnnnnnnnnnnnnnnnnnnnnnnnnnnnnnnnnnnnnnnnnnnnnnnnnnnnnnnnnnnnnnnnnnnnnnnnnnnnnnnnnnnnnnnnnnnnnnnnnnnnnnnnnnnnnnnnnnnnnnnnnnnnnnnnnnnnnnnnnnnnnnnnnnnnnnnnnnnnnnnnnnnnnnnnnnnnnnnnnnnnnnnnnnnnnnnnnnnnnnnnnnnnnnnnnnnnnnnnnnnnnnnnnnnnnnnnnnnnnnnnnnnnnnnnnnnnnnnnnnnnnnnnnnnnnnnnnnnnnnnnnnnnnnnnnnnnnnnnnnnnnnnnnnnnnnnnnnnnnnnnnnnnnnnnnnnnnnnnnnnnnnnnnnnnnnnnnnnnnnnnnnnnnnnnnnnnnnnnnnnnnnnnnnnnnnnnnnnnnnnnnnnnnnnnnnnnnnnnnnnnnnnnnnnnnnnnnnnnnnnnnnnnnnnnnnnnnnnnnnnnnnnnnnnnnnnnnnnnnnnnnnnnnnnnnnnnnnnnnnnnnnnnnnnnnnnnnnnnnnnnnnnnnnnnnnnnnnnnnnnnnnnnnnnnnnnnnnnnnnnnnnnnnnnnnnnnnnnnnnnnnnnnnnnnnnnnnnnnnnnnnnnnnnnnnnnnnnnnnnnnnnnnnnnnnnnnnnnnnnnnnnnnnnnnnnnnnnnnnnnnnnnnnnnnnnnnnnnnnnnnnnnnnnnnnnnnnnnnnnnnnnnnnnnnnnnnnnnnnnnnnnnnnnnnnnnnnnnnnnnnnnnnnnnnnnnnnnnnnnnnnnnnnnnnnnnnnnnnnnnnnnnnnnnnnnnnnnnnnnnnnnnnnnnnnnnnnnnnnnnnnnnnnnnnnnnnnnnnnnnnnnnnnnnnnnnnnnnnnnnnnnnnnnnnnnnnnnnnnnnnnnnnnnnnnnnnnnnnnnnnnnnnnnnnnnnnnnnnnnnnnnnnnnnnnnnnnnnnnnnnnnnnnnnnnnnnnnnnnnnnnnnnnnnnnnnnnnnnnnnnnnnnnnnnnnnnnnnnnnnnnnnnnnnnnnnnnnnnnnnnnnnnnnnnnnnnnnnnnnnnnnnnnnnnnnnnnnnnnnnnnnnnnnnnnnnnnnnnnnnnnnnnnnnnnnnnnnnnnnnnnnnnnnnnnnnnnnnnnnnnnnnnnnnnnnnnnnnnnnnnnnnnnnnnnnnnnnnnnnnnnnnnnnnnnnnnnnnnnnnnnnnnnnnnnnnnnnnnnnnnnnnnnnnnnnnnnnnnnnnnnnnnnnnnnnnnnnnnnnnnnnnnnnnnnnnnnnnnnnnnnnnnnnnnnnnnnnnnnnnnnnnnnnnnnnnnnnnnnnnnnnnnnnnnnnnnnnnnnnnnnnnnnnnnnnnnnnnnnnnnnnnnnnnnnnnnnnnnnnnnnnnnnnnnnnnnnnnnnnnnnnnnnnnnnnnnnnnnnnnnnnnnnnnnnnnnnnnnnnnnnnnnnnnnnnnnnnnnnnnnnnnnnnnnnnnnnnnnnnnnnnnnnnnnnnnnnnnnnnnnnnnnnnnnnnnnnnnnnnnnnnnnnnnnnnnnnnnnnnnnnnnnnnnnnnnnnnnnnnnnnnnnnnnnnnnnnnnnnnnnnnnnnnnnnnnnnnnnnnnnnnnnnnnnnnnnnnnnnnnnnnnnnnnnnnnnnnnnnnnnnnnnnnnnnnnnnnnnnnnnnnnnnnnnnnnnnnnnnnnnnnnnnnnnnnnnnnnnnnnnnnnnnnnnnnnnnnnnnnnnnnnnnnnnnnnnnnnnnnnnnnnnnnnnnnnnnnnnnnnnnnnnnnnnnnnnnnnnnnnnnnnnnnnnnnnnnnnnnnnnnnnnnnnnnnnnnnnnnnnnnnnnnnnnnnnnnnnnnnnnnnnnnnnnnnnnnnnnnnnnnnnnnnnnnnnnnnnnnnnnnnnnnnnnnnnnnnnnnnnnnnnnnnnnnnnnnnnnnnnnnnnnnnnnnnnnnnnnnnnnnnnnnnnnnnnnnnnnnnnnnnnnnnnnnnnnnnnnnnnnnnnnnnnnnnnnnnnnnnnnnnnnnnnnnnnnnnnnnnnnnnnnnnnnnnnnnnnnnnnnnnnnnnnnnnnnnnnnnnnnnnnnnnnnnnnnnnnnnnnnnnnnnnnnnnnnnnnnnnnnnnnnnnnnnnnnnnnnnnnnnnnnnnnnnnnnnnnnnnnnnnnnnnnnnnnnnnnnnnnnnnnnnnnnnnnnnnnnnnnnnnnnnnnnnnnnnnnnnnnnnnnnnnnnnnnnnnnnnnnnnnnnnnnnnnnnnnnnnnnnnnnnnnnnnnnnnnnnnnnnnnnnnnnnnnnnnnnnnnnnnnnnnnnnnnnnnnnnnnnnnnnnnnnnnnnnnnnnnnnnnnnnnnnnnnnnnnnnnnnnnnnnnnnnnnnnnnnnnnnnnnnnnnnnnnnnnnnnnnnnnnnnnnnnnnnnnnnnnnnnnnnnnnnnnnnnnnnnnnnnnnnnnnnnnnnnnnnnnnnnnnnnnnnnnnnnnnnnnnnnnnnnnnnnnnnnnnnnnnnnnnnnnnnnnnnnnnnnnnnnnnnnnnnnnnnnnnnnnnnnnnnnnnnnnnnnnnnnnnnnnnnnnnnnnnnnnnnnnnnnnnnnnnnnnnnnnnnnnnnnnnnnnnnnnnnnnnnnnnnnnnnnnnnnnnnnnnnnnnnnnnnnnnnnnnnnnnnnnnnnnnnnnnnnnnnnnnnnnnnnnnnnnnnnnnnnnnnnnnnnnnnnnnnnnnnnnnnnnnnnnnnnnnnnnnnnnnnnnnnnnnnnnnnnnnnnnnnnnnnnnnnnnnnnnnnnnnnnnnnnnnnnnnnnnnnnnnnnnnnnnnnnnnnnnnnnnnnnnnnnnnnnnnnnnnnnnnnnnnnnnnnnnnnnnnnnnnnnnnnnnnnnnnnnnnnnnnnnnnnnnnnnnnnnnnnnnnnnnnnnnnnnnnnnnnnnnnnnnnnnnnnnnnnnnnnnnnnnnnnnnnnnnnnnnnnnnnnnnnnnnnnnnnnnnnnnnnnnnnnnnnnnnnnnnnnnnnnnnnnnnnnnnnnnnnnnnnnnnnnnnnnnnnnnnnnnnnnnnnnnnnnnnnnnnnnnnnnnnnnnnnnnnnnnnnnnnnnnnnnnnnnnnnnnnnnnnnnnnnnnnnnnnnnnnnnnnnnnnnnnnnnnnnnnnnnnnnnnnnnnnnnnnnnnnnnnnnnnnnnnnnnnnnnnnnnnnnnnnnnnnnnnnnnnnnnnnnnnnnnnnnnnnnnnnnnnnnnnnnnnnnnnnnnnnnnnnnnnnnnnnnnnnnnnnnnnnnnnnnnnnnnnnnnnnnnnnnnnnnnnnnnnnnnnnnnnnnnnnnnnnnnnnnnnnnnnnnnnnnnnnnnnnnnnnnnnnnnnnnnnnnnnnnnnnnnnnnnnnnnnnnnnnnnnnnnnnnnnnnnnnnnnnnnnnnnnnnnnnnnnnnnnnnnnnnnnnnnnnnnnnnnnnnnnnnnnnnnnnnnnnnnnnnnnnnnnnnnnnnnnnnnnnnnnnnnnnnnnnnnnnnnnnnnnnnnnnnnnnnnnnnnnnnnnnnnnnnnnnnnnnnnnnnnnnnnnnnnnnnnnnnnnnnnnnnnnnnnnnnnnnnnnnnnnnnnnnnnnnnnnnnnnnnnnnnnnnnnnnnnnnnnnnnnnnnnnnnnnnnnnnnnnnnnnnnnnnnnnnnnnnnnnnnnnnnnnnnnnnnnnnnnnnnnnnnnnnnnnnnnnnnnnnnnnnnnnnnnnnnnnnnnnnnnnnnnnnnnnnnnnnnnnnnnnnnnnnnnnnnnnnnnnnnnnnnnnnnnnnnnnnnnnnnnnnnnnnnnnnnnnnnnnnnnnnnnnnnnnnnnnnnnnnnnnnnnnnnnnnnnnnnnnnnnnnnnnnnnnnnnnnnnnnnnnnnnnnnnnnnnnnnnnnnnnnnnnnnnnnnnnnnnnnnnnnnnnnnnnnnnnnnnnnnnnnnnnnnnnnnnnnnnnnnnnnnnnnnnnnnnnnnnnnnnnnnnnnnnnnnnnnnnnnnnnnnnnnnnnnnnnnnnnnnnnnnnnnnnnnnnnnnnnnnnnnnnnnnnnnnnnnnnnnnnnnnnnnnnnnnnnnnnnnnnnnnnnnnnnnnnnnnnnnnnnnnnnnnnnnnnnnnnnnnnnnnnnnnnnnnnnnnnnnnnnnnnnnnnnnnnnnnnnnnnnnnnnnnnnnnnnnnnnnnnnnnnnnnnnnnnnnnnnnnnnnnnnnnnnnnnnnnnnnnnnnnnnnnnnnnnnnnnnnnnnnnnnnnnnnnnnnnnnnnnnnnnnnnnnnnnnnnnnnnnnnnnnnnnnnnnnnnnnnnnnnnnnnnnnnnnnnnnnnnnnnnnnnnnnnnnnnnnnnnnnnnnnnnnnnnnnnnnnnnnnnnnnnnnnnnnnnnnnnnnnnnnnnnnnnnnnnnnnnnnnnnnnnnnnnnnnnnnnnnnnnnnnnnnnnnnnnnnnnnnnnnnnnnnnnnnnnnnnnnnnnnnnnnnnnnnnnnnnnnnnnnnnnnnnnnnnnnnnnnnnnnnnnnnnnnnnnnnnnnnnnnnnnnnnnnnnnnnnnnnnnnnnnnnnnnnnnnnnnnnnnnnnnnnnnnnnnnnnnnnnnnnnnnnnnnnnnnnnnnnnnnnnnnnnnnnnnnnnnnnnnnnnnnnnnnnnnnnnnnnnnnnnnnnnnnnnnnnnnnnnnnnnnnnnnnnnnnnnnnnnnnnnnnnnnnnnnnnnnnnnnnnnnnnnnnnnnnnnnnnnnnnnnnnnnnnnnnnnnnnnnnnnnnnnnnnnnnnnnnnnnnnnnnnnnnnnnnnnnnnnnnnnnnnnnnnnnnnnnnnnnnnnnnnnnnnnnnnnnnnnnnnnnnnnnnnnnnnnnnnnnnnnnnnnnnnnnnnnnnnnnnnnnnnnnnnnnnnnnnnnnnnnnnnnnnnnnnnnnnnnnnnnnnnnnnnnnnnnnnnnnnnnnnnnnnnnnnnnnnnnnnnnnnnnnnnnnnnnnnnnnnnnnnnnnnnnnnnnnnnnnnnnnnnnnnnnnnnnnnnnnnnnnnnnnnnnnnnnnnnnnnnnnnnnnnnnnnnnnnnnnnnnnnnnnnnnnnnnnnnnnnnnnnnnnnnnnnnnnnnnnnnnnnnnnnnnnnnnnnnnnnnnnnnnnnnnnnnnnnnnnnnnnnnnnnnnnnnnnnnnnnnnnnnnnnnnnnnnnnnnnnnnnnnnnnnnnnnnnnnnnnnnnnnnnnnnnnnnnnnnnnnnnnnnnnnnnnnnnnnnnnnnnnnnnnnnnnnnnnnnnnnnnnnnnnnnnnnnnnnnnnnnnnnnnnnnnnnnnnnnnnnnnnnnnnnnnnnnnnnnnnnnnnnnnnnnnnnnnnnnnnnnnnnnnnnnnnnnnnnnnnnnnnnnnnnnnnnnnnnnnnnnnnnnnnnnnnnnnnnnnnnnnnnnnnnnnnnnnnnnnnnnnnnnnnnnnnnnnnnnnnnnnnnnnnnnnnnnnnnnnnnnnnnnnnnnnnnnnnnnnnnnnnnnnnnnnnnnnnnnnnnnnnnnnnnnnnnnnnnnnnnnnnnnnnnnnnnnnnnnnnnnnnnnnnnnnnnnnnnnnnnnnnnnnnnnnnnnnnnnnnnnnnnnnnnnnnnnnnnnnnnnnnnnnnnnnnnnnnnnnnnnnnnnnnnnnnnnnnnnnnnnnnnnnnnnnnnnnnnnnnnnnnnnnnnnnnnnnnnnnnnnnnnnnnnnnnnnnnnnnnnnnnnnnnnnnnnnnnnnnnnnnnnnnnnnnnnnnnnnnnnnnnnnnnnnnnnnnnnnnnnnnnnnnnnnnnnnnnnnnnnnnnnnnnnnnnnnnnnnnnnnnnnnnnnnnnnnnnnnnnnnnnnnnnnnnnnnnnnnnnnnnnnnnnnnnnnnnnnnnnnnnnnnnnnnnnnnnnnnnnnnnnnnnnnnnnnnnnnnnnnnnnnnnnnnnnnnnnnnnnnnnnnnnnnnnnnnnnnnnnnnnnnnnnnnnnnnnnnnnnnnnnnnnnnnnnnnnnnnnnnnnnnnnnnnnnnnnnnnnnnnnnnnnnnnnnnnnnnnnnnnnnnnnnnnnnnnnnnnnnnnnnnnnnnnnnnnnnnnnnnnnnnnnnnnnnnnnnnnnnnnnnnnnnnnnnnnnnnnnnnnnnnnnnnnnnnnnnnnnnnnnnnnnnnnnnnnnnnnnnnnnnnnnnnnnnnnnnnnnnnnnnnnnnnnnnnnnnnnnnnnnnnnnnnnnnnnnnnnnnnnnnnnnnnnnnnnnnnnnnnnnnnnnnnnnnnnnnnnnnnnnnnnnnnnnnnnnnnnnnnnnnnnnnnnnnnnnnnnnnnnnnnnnnnnnnnnnnnnnnnnnnnnnnnnnnnnnnnnnnnnnnnnnnnnnnnnnnnnnnnnnnnnnnnnnnnnnnnnnnnnnnnnnnnnnnnnnnnnnnnnnnnnnnnnnnnnnnnnnnnnnnnnnnnnnnnnnnnnnnnnnnnnnnnnnnnnnnnnnnnnnnnnnnnnnnnnnnnnnnnnnnnnnnnnnnnnnnnnnnnnnnnnnnnnnnnnnnnnnnnnnnnnnnnnnnnnnnnnnnnnnnnnnnnnnnnnnnnnnnnnnnnnnnnnnnnnnnnnnnnnnnnnnnnnnnnnnnnnnnnnnnnnnnnnnnnnnnnnnnnnnnnnnnnnnnnnnnnnnnnnnnnnnnnnnnnnnnnnnnnnnnnnnnnnnnnnnnnnnnnnnnnnnnnnnnnnnnnnnnnnnnnnnnnnnnnnnnnnnnnnnnnnnnnnnnnnnnnnnnnnnnnnnnnnnnnnnnnnnnnnnnnnnnnnnnnnnnnnnnnnnnnnnnnnnnnnnnnnnnnnnnnnnnnnnnnnnnnnnnnnnnnnnnnnnnnnnnnnnnnnnnnnnnnnnnnnnnnnnnnnnnnnnnnnnnnnnnnnnnnnnnnnnnnnnnnnnnnnnnnnnnnnnnnnnnnnnnnnnnnnnnnnnnnnnnnnnnnnnnnnnnnnnnnnnnnnnnnnnnnnnnnnnnnnnnnnnnnnnnnnnnnnnnnnnnnnnnnnnnnnnnnnnnnnnnnnnnnnnnnnnnnnnnnnnnnnnnnnnnnnnnnnnnnnnnnnnnnnnnnnnnnnnnnnnnnnnnnnnnnnnnnnnnnnnnnnnnnnnnnnnnnnnnnnnnnnnnnnnnnnnnnnnnnnnnnnnnnnnnnnnnnnnnnnnnnnnnnnnnnnnnnnnnnnnnnnnnnnnnnnnnnnnnnnnnnnnnnnnnnnnnnnnnnnnnnnnnnnnnnnnnnnnnnnnnnnnnnnnnnnnnnnnnnnnnnnnnnnnnnnnnnnnnnnnnnnnnnnnnnnnnnnnnnnnnnnnnnnnnnnnnnnnnnnnnnnnnnnnnnnnnnnnnnnnnnnnnnnnnnnnnnnnnnnnnnnnnnnnnnnnnnnnnnnnnnnnnnnnnnnnnnnnnnnnnnnnnnnnnnnnnnnnnnnnnnnnnnnnnnnnnnnnnnnnnnnnnnnnnnnnnnnnnnnnnnnnnnnnnnnnnnnnnnnnnnnnnnnnnnnnnnnnnnnnnnnnnnnnnnnnnnnnnnnnnnnnnnnnnnnnnnnnnnnnnnnnnnnnnnnnnnnnnnnnnnnnnnnnnnnnnnnnnnnnnnnnnnnnnnnnnnnnnnnnnnnnnnnnnnnnnnnnnnnnnnnnnnnnnnnnnnnnnnnnnnnnnnnnnnnnnnnnnnnnnnnnnnnnnnnnnnnnnnnnnnnnnnnnnnnnnnnnnnnnnnnnnnnnnnnnnnnnnnnnnnnnnnnnnnnnnnnnnnnnnnnnnnnnnnnnnnnnnnnnnnnnnnnnnnnnnnnnnnnnnnnnnnnnnnnnnnnnnnnnnnnnnnnnnnnnnnnnnnnnnnnnnnnnnnnnnnnnnnnnnnnnnnnnnnnnnnnnnnnnnnnnnnnnnnnnnnnnnnnnnnnnnnnnnnnnnnnnnnnnnnnnnnnnnnnnnnnnnnnnnnnnnnnnnnnnnnnnnnnnnnnnnnnnnnnnnnnnnnnnnnnnnnnnnnnnnnnnnnnnnnnnnnnnnnnnnnnnnnnnnnnnnnnnnnnnnnnnnnnnnnnnnnnnnnnnnnnnnnnnnnnnnnnnnnnnnnnnnnnnnnnnnnnnnnnnnnnnnnnnnnnnnnnnnnnnnnnnnnnnnnnnnnnnnnnnnnnnnnnnnnnnnnnnnnnnnnnnnnnnnnnnnnnnnnnnnnnnnnnnnnnnnnnnnnnnnnnnnnnnnnnnnnnnnnnnnnnnnnnnnnnnnnnnnnnnnnnnnnnnnnnnnnnnnnnnnnnnnnnnnnnnnnnnnnnnnnnnnnnnnnnnnnnnnnnnnnnnnnnnnnnnnnnnnnnnnnnnnnnnnnnnnnnnnnnnnnnnnnnnnnnnnnnnnnnnnnnnnnnnnnnnnnnnnnnnnnnnnnnnnnnnnnnnnnnnnnnnnnnnnnnnnnnnnnnnnnnnnnnnnnnnnnnnnnnnnnnnnnnnnnnnnnnnnnnnnnnnnnnnnnnnnnnnnnnnnnnnnnnnnnnnnnnnnnnnnnnnnnnnnnnnnnnnnnnnnnnnnnnnnnnnnnnnnnnnnnnnnnnnnnnnnnnnnnnnnnnnnnnnnnnnnnnnnnnnnnnnnnnnnnnnnnnnnnnnnnnnnnnnnnnnnnnnnnnnnnnnnnnnnnnnnnnnnnnnnnnnnnnnnnnnnnnnnnnnnnnnnnnnnnnnnnnnnnnnnnnnnnnnnnnnnnnnnnnnnnnnnnnnnnnnnnnnnnnnnnnnnnnnnnnnnnnnnnnnnnnnnnnnnnnnnnnnnnnnnnnnnnnnnnnnnnnnnnnnnnnnnnnnnnnnnnnnnnnnnnnnnnnnnnnnnnnnnnnnnnnnnnnnnnnnnnnnnnnnnnnnnnnnnnnnnnnnnnnnnnnnnnnnnnnnnnnnnnnnnnnnnnnnnnnnnnnnnnnnnnnnnnnnnnnnnnnnnnnnnnnnnnnnnnnnnnnnnnnnnnnnnnnnnnnnnnnnnnnnnnnnnnnnnnnnnnnnnnnnnnnnnnnnnnnnnnnnnnnnnnnnnnnnnnnnnnnnnnnnnnnnnnnnnnnnnnnnnnnnnnnnnnnnnnnnnnnnnnnnnnnnnnnnnnnnnnnnnnnnnnnnnnnnnnnnnnnnnnnnnnnnnnnnnnnnnnnnnnnnnnnnnnnnnnnnnnnnnnnnnnnnnnnnnnnnnnnnnnnnnnnnnnnnnnnnnnnnnnnnnnnnnnnnnnnnnnnnnnnnnnnnnnnnnnnnnnnnnnnnnnnnnnnnnnnnnnnnnnnnnnnnnnnnnnnnnnnnnnnnnnnnnnnnnnnnnnnnnnnnnnnnnnnnnnnnnnnnnnnnnnnnnnnnnnnnnnnnnnnnnnnnnnnnnnnnnnnnnnnnnnnnnnnnnnnnnnnnnnnnnnnnnnnnnnnnnnnnnnnnnnnnnnnnnnnnnnnnnnnnnnnnnnnnnnnnnnnnnnnnnnnnnnnnnnnnnnnnnnnnnnnnnnnnnnnnnnnnnnnnnnnnnnnnnnnnnnnnnnnnnnnnnnnnnnnnnnnnnnnnnnnnnnnnnnnnnnnnnnnnnnnnnnnnnnnnnnnnnnnnnnnnnnnnnnnnnnnnnnnnnnnnnnnnnnnnnnnnnnnnnnnnnnnnnnnnnnnnnnnnnnnnnnnnnnnnnnnnnnnnnnnnnnnnnnnnnnnnnnnnnnnnnnnnnnnnnnnnnnnnnnnnnnnnnnnnnnnnnnnnnnnnnnnnnnnnnnnnnnnnnnnnnnnnnnnnnnnnnnnnnnnnnnnnnnnnnnnnnnnnnnnnnnnnnnnnnnnnnnnnnnnnnnnnnnnnnnnnnnnnnnnnnnnnnnnnnnnnnnnnnnnnnnnnnnnnnnnnnnnnnnnnnnnnnnnnnnnnnnnnnnnnnnnnnnnnnnnnnnnnnnnnnnnnnnnnnnnnnnnnnnnnnnnnnnnnnnnnnnnnnnnnnnnnnnnnnnnnnnnnnnnnnnnnnnnnnnnnnnnnnnnnnnnnnnnnnnnnnnnnnnnnnnnnnnnnnnnnnnnnnnnnnnnnnnnnnnnnnnnnnnnnnnnnnnnnnnnnnnnnnnnnnnnnnnnnnnnnnnnnnnnnnnnnnnnnnnnnnnnnnnnnnnnnnnnnnnnnnnnnnnnnnnnnnnnnnnnnnnnnnnnnnnnnnnnnnnnnnnnnnnnnnnnnnnnnnnnnnnnnnnnnnnnnnnnnnnnnnnnnnnnnnnnnnnnnnnnnnnnnnnnnnnnnnnnnnnnnnnnnnnnnnnnnnnnnnnnnnnnnnnnnnnnnnnnnnnnnnnnnnnnnnnnnnnnnnnnnnnnnnnnnnnnnnnnnnnnnnnnnnnnnnnnnnnnnnnnnnnnnnnnnnnnnnnnnnnnnnnnnnnnnnnnnnnnnnnnnnnnnnnnnnnnnnnnnnnnnnnnnnnnnnnnnnnnnnnnnnnnnnnnnnnnnnnnnnnnnnnnnnnnnnnnnnnnnnnnnnnnnnnnnnnnnnnnnnnnnnnnnnnnnnnnnnnnnnnnnnnnnnnnnnnnnnnnnnnnnnnnnnnnnnnnnnnnnnnnnnnnnnnnnnnnnnnnnnnnnnnnnnnnnnnnnnnnnnnnnnnnnnnnnnnnnnnnnnnnnnnnnnnnnnnnnnnnnnnnnnnnnnnnnnnnnnnnnnnnnnnnnnnnnnnnnnnnnnnnnnnnnnnnnnnnnnnnnnnnnnnnnnnnnnnnnnnnnnnnnnnnnnnnnnnnnnnnnnnnnnnnnnnnnnnnnnnnnnnnnnnnnnnnnnnnnnnnnnnnnnnnnnnnnnnnnnnnnnnnnnnnnnnnnnnnnnnnnnnnnnnnnnnnnnnnnnnnnnnnnnnnnnnnnnnnnnnnnnnnnnnnnnnnnnnnnnnnnnnnnnnnnnnnnnnnnnnnnnnnnnnnnnnnnnnnnnnnnnnnnnnnnnnnnnnnnnnnnnnnnnnnnnnnnnnnnnnnnnnnnnnnnnnnnnnnnnnnnnnnnnnnnnnnnnnnnnnnnnnnnnnnnnnnnnnnnnnnnnnnnnnnnnnnnnnnnnnnnnnnnnnnnnnnnnnnnnnnnnnnnnnnnnnnnnnnnnnnnnnnnnnnnnnnnnnnnnnnnnnnnnnnnnnnnnnnnnnnnnnnnnnnnnnnnnnnnnnnnnnnnnnnnnnnnnnnnnnnnnnnnnnnnnnnnnnnnnnnnnnnnnnnnnnnnnnnnnnnnnnnnnnnnnnnnnnnnnnnnnnnnnnnnnnnnnnnnnnnnnnnnnnnnnnnnnnnnnnnnnnnnnnnnnnnnnnnnnnnnnnnnnnnnnnnnnnnnnnnnnnnnnnnnnnnnnnnnnnnnnnnnnnnnnnnnnnnnnnnnnnnnnnnnnnnnnnnnnnnnnnnnnnnnnnnnnnnnnnnnnnnnnnnnnnnnnnnnnnnnnnnnnnnnnnnnnnnnnnnnnnnnnnnnnnnnnnnnnnnnnnnnnnnnnnnnnnnnnnnnnnnnnnnnnnnnnnnnnnnnnnnnnnnnnnnnnnnnnnnnnnnnnnnnnnnnnnnnnnnnnnnnnnnnnnnnnnnnnnnnnnnnnnnnnnnnnnnnnnnnnnnnnnnnnnnnnnnnnnnnnnnnnnnnnnnnnnnnnnnnnnnnnnnnnnnnnnnnnnnnnnnnnnnnnnnnnnnnnnnnnnnnnnnnnnnnnnnnnnnnnnnnnnnnnnnnnnnnnnnnnnnnnnnnnnnnnnnnnnnnnnnnnnnnnnnnnnnnnnnnnnnnnnnnnnnnnnnnnnnnnnnnnnnnnnnnnnnnnnnnnnnnnnnnnnnnnnnnnnnnnnnnnnnnnnnnnnnnnnnnnnnnnnnnnnnnnnnnnnnnnnnnnnnnnnnnnnnnnnnnnnnnnnnnnnnnnnnnnnnnnnnnnnnnnnnnnnnnnnnnnnnnnnnnnnnnnnnnnnnnnnnnnnnnnnnnnnnnnnnnnnnnnnnnnnnnnnnnnnnnnnnnnnnnnnnnnnnnnnnnnnnnnnnnnnnnnnnnnnnnnnnnnnnnnnnnnnnnnnnnnnnnnnnnnnnnnnnnnnnnnnnnnnnnnnnnnnnnnnnnnnnnnnnnnnnnnnnnnnnnnnnnnnnnnnnnnnnnnnnnnnnnnnnnnnnnnnnnnnnnnnnnnnnnnnnnnnnnnnnnnnnnnnnnnnnnnnnnnnnnnnnnnnnnnnnnnnnnnnnnnnnnnnnnnnnnnnnnnnnnnnnnnnnnnnnnnnnnnnnnnnnnnnnnnnnnnnnnnnnnnnnnnnnnnnnnnnnnnnnnnnnnnnnnnnnnnnnnnnnnnnnnnnnnnnnnnnnnnnnnnnnnnnnnnnnnnnnnnnnnnnnnnnnnnnnnnnnnnnnnnnnnnnnnnnnnnnnnnnnnnnnnnnnnnnnnnnnnnnnnnnnnnnnnnnnnnnnnnnnnnnnnnnnnnnnnnnnnnnnnnnnnnnnnnnnnnnnnnnnnnnnnnnnnnnnnnnnnnnnnnnnnnnnnnnnnnnnnnnnnnnnnnnnnnnnnnnnnnnnnnnnnnnnnnnnnnnnnnnnnnnnnnnnnnnnnnnnnnnnnnnnnnnnnnnnnnnnnnnnnnnnnnnnnnnnnnnnnnnnnnnnnnnnnnnnnnnnnnnnnnnnnnnnnnnnnnnnnnnnnnnnnnnnnnnnnnnnnnnnnnnnnnnnnnnnnnnnnnnnnnnnnnnnnnnnnnnnnnnnnnnnnnnnnnnnnnnnnnnnnnnnnnnnnnnnnnnnnnnnnnnnnnnnnnnnnnnnnnnnnnnnnnnnnnnnnnnnnnnnnnnnnnnnnnnnnnnnnnnnnnnnnnnnnnnnnnnnnnnnnnnnnnnnnnnnnnnnnnnnnnnnnnnnnnnnnnnnnnnnnnnnnnnnnnnnnnnnnnnnnnnnnnnnnnnnnnnnnnnnnnnnnnnnnnnnnnnnnnnnnnnnnnnnnnnnnnnnnnnnnnnnnnnnnnnnnnnnnnnnnnnnnnnnnnnnnnnnnnnnnnnnnnnnnnnnnnnnnnnnnnnnnnnnnnnnnnnnnnnnnnnnnnnnnnnnnnnnnnnnnnnnnnnnnnnnnnnnnnnnnnnnnnnnnnnnnnnnnnnnnnnnnnnnnnnnnnnnnnnnnnnnnnnnnnnnnnnnnnnnnnnnnnnnnnnnnnnnnnnnnnnnnnnnnnnnnnnnnnnnnnnnnnnnnnnnnnnnnnnnnnnnnnnnnnnnnnnnnnnnnnnnnnnnnnnnnnnnnnnnnnnnnnnnnnnnnnnnnnnnnnnnnnnnnnnnnnnnnnnnnnnnnnnnnnnnnnnnnnnnnnnnnnnnnnnnnnnnnnnnnnnnnnnnnnnnnnnnnnnnnnnnnnnnnnnnnnnnnnnnnnnnnnnnnnnnnnnnnnnnnnnnnnnnnnnnnnnnnnnnnnnnnnnnnnnnnnnnnnnnnnnnnnnnnnnnnnnnnnnnnnnnnnnnnnnnnnnnnnnnnnnnnnnnnnnnnnnnnnnnnnnnnnnnnnnnnnnnnnnnnnnnnnnnnnnnnnnnnnnnnnnnnnnnnnnnnnnnnnnnnnnnnnnnnnnnnnnnnnnnnnnnnnnnnnnnnnnnnnnnnnnnnnnnnnnnnnnnnnnnnnnnnnnnnnnnnnnnnnnnnnnnnnnnnnnnnnnnnnnnnnnnnnnnnnnnnnnnnnnnnnnnnnnnnnnnnnnnnnnnnnnnnnnnnnnnnnnnnnnnnnnnnnnnnnnnnnnnnnnnnnnnnnnnnnnnnnnnnnnnnnnnnnnnnnnnnnnnnnnnnnnnnnnnnnnnnnnnnnnnnnnnnnnnnnnnnnnnnnnnnnnnnnnnnnnnnnnnnnnnnnnnnnnnnnnnnnnnnnnnnnnnnnnnnnnnnnnnnnnnnnnnnnnnnnnnnnnnnnnnnnnnnnnnnnnnnnnnnnnnnnnnnnnnnnnnnnnnnnnnnnnnnnnnnnnnnnnnnnnnnnnnnnnnnnnnnnnnnnnnnnnnnnnnnnnnnnnnnnnnnnnnnnnnnnnnnnnnnnnnnnnnnnnnnnnnnnnnnnnnnnnnnnnnnnnnnnnnnnnnnnnnnnnnnnnnnnnnnnnnnnnnnnnnnnnnnnnnnnnnnnnnnnnnnnnnnnnnnnnnnnnnnnnnnnnnnnnnnnnnnnnnnnnnnnnnnnnnnnnnnnnnnnnnnnnnnnnnnnnnnnnnnnnnnnnnnnnnnnnnnnnnnnnnnnnnnnnnnnnnnnnnnnnnnnnnnnnnnnnnnnnnnnnnnnnnnnnnnnnnnnnnnnnnnnnnnnnnnnnnnnnnnnnnnnnnnnnnnnnnnnnnnnnnnnnnnnnnnnnnnnnnnnnnnnnnnnnnnnnnnnnnnnnnnnnnnnnnnnnnnnnnnnnnnnnnnnnnnnnnnnnnnnnnnnnnnnnnnnnnnnnnnnnnnnnnnnnnnnnnnnnnnnnnnnnnnnnnnnnnnnnnnnnnnnnnnnnnnnnnnnnnnnnnnnnnnnnnnnnnnnnnnnnnnnnnnnnnnnnnnnnnnnnnnnnnnnnnnnnnnnnnnnnnnnnnnnnnnnnnnnnnnnnnnnnnnnnnnnnnnnnnnnnnnnnnnnnnnnnnnnnnnnnnnnnnnnnnnnnnnnnnnnnnnnnnnnnnnnnnnnnnnnnnnnnnnnnnnnnnnnnnnnnnnnnnnnnnnnnnnnnnnnnnnnnnnnnnnnnnnnnnnnnnnnnnnnnnnnnnnnnnnnnnnnnnnnnnnnnnnnnnnnnnnnnnnnnnnnnnnnnnnnnnnnnnnnnnnnnnnnnnnnnnnnnnnnnnnnnnnnnnnnnnnnnnnnnnnnnnnnnnnnnnnnnnnnnnnnnnnnnnnnnnnnnnnnnnnnnnnnnnnnnnnnnnnnnnnnnnnnnnnnnnnnnnnnnnnnnnnnnnnnnnnnnnnnnnnnnnnnnnnnnnnnnnnnnnnnnnnnnnnnnnnnnnnnnnnnnnnnnnnnnnnnnnnnnnnnnnnnnnnnnnnnnnnnnnnnnnnnnnnnnnnnnnnnnnnnnnnnnnnnnnnnnnnnnnnnnnnnnnnnnnnnnnnnnnnnnnnnnnnnnnnnnnnnnnnnnnnnnnnnnnnnnnnnnnnnnnnnnnnnnnnnnnnnnnnnnnnnnnnnnnnnnnnnnnnnnnnnnnnnnnnnnnnnnnnnnnnnnnnnnnnnnnnnnnnnnnnnnnnnnnnnnnnnnnnnnnnnnnnnnnnnnnnnnnnnnnnnnnnnnnnnnnnnnnnnnnnnnnnnnnnnnnnnnnnnnnnnnnnnnnnnnnnnnnnnnnnnnnnnnnnnnnnnnnnnnnnnnnnnnnnnnnnnnnnnnnnnnnnnnnnnnnnnnnnnnnnnnnnnnnnnnnnnnnnnnnnnnnnnnnnnnnnnnnnnnnnnnnnnnnnnnnnnnnnnnnnnnnnnnnnnnnnnnnnnnnnnnnnnnnnnnnnnnnnnnnnnnnnnnnnnnnnnnnnnnnnnnnnnnnnnnnnnnnnnnnnnnnnnnnnnnnnnnnnnnnnnnnnnnnnnnnnnnnnnnnnnnnnnnnnnnnnnnnnnnnnnnnnnnnnnnnnnnnnnnnnnnnnnnnnnnnnnnnnnnnnnnnnnnnnnnnnnnnnnnnnnnnnnnnnnnnnnnnnnnnnnnnnnnnnnnnnnnnnnnnnnnnnnnnnnnnnnnnnnnnnnnnnnnnnnnnnnnnnnnnnnnnnnnnnnnnnnnnnnnnnnnnnnnnnnnnnnnnnnnnnnnnnnnnnnnnnnnnnnnnnnnnnnnnnnnnnnnnnnnnnnnnnnnnnnnnnnnnnnnnnnnnnnnnnnnnnnnnnnnnnnnnnnnnnnnnnnnnnnnnnnnnnnnnnnnnnnnnnnnnnnnnnnnnnnnnnnnnnnnnnnnnnnnnnnnnnnnnnnnnnnnnnnnnnnnnnnnnnnnnnnnnnnnnnnnnnnnnnnnnnnnnnnnnnnnnnnnnnnnnnnnnnnnnnnnnnnnnnnnnnnnnnnnnnnnnnnnnnnnnnnnnnnnnnnnnnnnnnnnnnnnnnnnnnnnnnnnnnnnnnnnnnnnnnnnnnnnnnnnnnnnnnnnnnnnnnnnnnnnnnnnnnnnnnnnnnnnnnnnnnnnnnnnnnnnnnnnnnnnnnnnnnnnnnnnnnnnnnnnnnnnnnnnnnnnnnnnnnnnnnnnnnnnnnnnnnnnnnnnnnnnnnnnnnnnnnnnnnnnnnnnnnnnnnnnnnnnnnnnnnnnnnnnnnnnnnnnnnnnnnnnnnnnnnnnnnnnnnnnnnnnnnnnnnnnnnnnnnnnnnnnnnnnnnnnnnnnnnnnnnnnnnnnnnnnnnnnnnnnnnnnnnnnnnnnnnnnnnnnnnnnnnnnnnnnnnnnnnnnnnnnnnnnnnnnnnnnnnnnnnnnnnnnnnnnnnnnnnnnnnnnnnnnnnnnnnnnnnnnnnnnnnnnnnnnnnnnnnnnnnnnnnnnnnnnnnnnnnnnnnnnnnnnnnnnnnnnnnnnnnnnnnnnnnnnnnnnnnnnnnnnnnnnnnnnnnnnnnnnnnnnnnnnnnnnnnnnnnnnnnnnnnnnnnnnnnnnnnnnnnnnnnnnnnnnnnnnnnnnnnnnnnnnnnnnnnnnnnnnnnnnnnnnnnnnnnnnnnnnnnnnnnnnnnnnnnnnnnnnnnnnnnnnnnnnnnnnnnnnnnnnnnnnnnnnnnnnnnnnnnnnnnnnnnnnnnnnnnnnnnnnnnnnnnnnnnnnnnnnnnnnnnnnnnnnnnnnnnnnnnnnnnnnnnnnnnnnnnnnnnnnnnnnnnnnnnnnnnnnnnnnnnnnnnnnnnnnnnnnnnnnnnnnnnnnnnnnnnnnnnnnnnnnnnnnnnnnnnnnnnnnnnnnnnnnnnnnnnnnnnnnnnnnnnnnnnnnnnnnnnnnnnnnnnnnnnnnnnnnnnnnnnnnnnnnnnnnnnnnnnnnnnnnnnnnnnnnnnnnnnnnnnnnnnnnnnnnnnnnnnnnnnnnnnnnnnnnnnnnnnnnnnnnnnnnnnnnnnnnnnnnnnnnnnnnnnnnnnnnnnnnnnnnnnnnnnnnnnnnnnnnnnnnnnnnnnnnnnnnnnnnnnnnnnnnnnnnnnnnnnnnnnnnnnnnnnnnnnnnnnnnnnnnnnnnnnnnnnnnnnnnnnnnnnnnnnnnnnnnnnnnnnnnnnnnnnnnnnnnnnnnnnnnnnnnnnnnnnnnnnnnnnnnnnnnnnnnnnnnnnnnnnnnnnnnnnnnnnnnnnnnnnnnnnnnnnnnnnnnnnnnnnnnnnnnnnnnnnnnnnnnnnnnnnnnnnnnnnnnnnnnnnnnnnnnnnnnnnnnnnnnnnnnnnnnnnnnnnnnnnnnnnnnnnnnnnnnnnnnnnnnnnnnnnnnnnnnnnnnnnnnnnnnnnnnnnnnnnnnnnnnnnnnnnnnnnnnnnnnnnnnnnnnnnnnnnnnnnnnnnnnnnnnnnnnnnnnnnnnnnnnnnnnnnnnnnnnnnnnnnnnnnnnnnnnnnnnnnnnnnnnnnnnnnnnnnnnnnnnnnnnnnnnnnnnnnnnnnnnnnnnnnnnnnnnnnnnnnnnnnnnnnnnnnnnnnnnnnnnnnnnnnnnnnnnnnnnnnnnnnnnnnnnnnnnnnnnnnnnnnnnnnnnnnnnnnnnnnnnnnnnnnnnnnnnnnnnnnnnnnnnnnnnnnnnnnnnnnnnnnnnnnnnnnnnnnnnnnnnnnnnnnnnnnnnnnnnnnnnnnnnnnnnnnnnnnnnnnnnnnnnnnnnnnnnnnnnnnnnnnnnnnnnnnnnnnnnnnnnnnnnnnnnnnnnnnnnnnnnnnnnnnnnnnnnnnnnnnnnnnnnnnnnnnnnnnnnnnnnnnnnnnnnnnnnnnnnnnnnnnnnnnnnnnnnnnnnnnnnnnnnnnnnnnnnnnnnnnnnnnnnnnnnnnnnnnnnnnnnnnnnnnnnnnnnnnnnnnnnnnnnnnnnnnnnnnnnnnnnnnnnnnnnnnnnnnnnnnnnnnnnnnnnnnnnnnnnnnnnnnnnnnnnnnnnnnnnnnnnnnnnnnnnnnnnnnnnnnnnnnnnnnnnnnnnnnnnnnnnnnnnnnnnnnnnnnnnnnnnnnnnnnnnnnnnnnnnnnnnnnnnnnnnnnnnnnnnnnnnnnnnnnnnnnnnnnnnnnnnnnnnnnnnnnnnnnnnnnnnnnnnnnnnnnnnnnnnnnnnnnnnnnnnnnnnnnnnnnnnnnnnnnnnnnnnnnnnnnnnnnnnnnnnnnnnnnnnnnnnnnnnnnnnnnnnnnnnnnnnnnnnnnnnnnnnnnnnnnnnnnnnnnnnnnnnnnnnnnnnnnnnnnnnnnnnnnnnnnnnnnnnnnnnnnnnnnnnnnnnnnnnnnnnnnnnnnnnnnnnnnnnnnnnnnnnnnnnnnnnnnnnnnnnnnnnnnnnnnnnnnnnnnnnnnnnnnnnnnnnnnnnnnnnnnnnnnnnnnnnnnnnnnnnnnnnnnnnnnnnnnnnnnnnnnnnnnnnnnnnnnnnnnnnnnnnnnnnnnnnnnnnnnnnnnnnnnnnnnnnnnnnnnnnnnnnnnnnnnnnnnnnnnnnnnnnnnnnnnnnnnnnnnnnnnnnnnnnnnnnnnnnnnnnnnnnnnnnnnnnnnnnnnnnnnnnnnnnnnnnnnnnnnnnnnnnnnnnnnnnnnnnnnnnnnnnnnnnnnnnnnnnnnnnnnnnnnnnnnnnnnnnnnnnnnnnnnnnnnnnnnnnnnnnnnnnnnnnnnnnnnnnnnnnnnnnnnnnnnnnnnnnnnnnnnnnnnnnnnnnnnnnnnnnnnnnnnnnnnnnnnnnnnnnnnnnnnnnnnnnnnnnnnnnnnnnnnnnnnnnnnnnnnnnnnnnnnnnnnnnnnnnnnnnnnnnnnnnnnnnnnnnnnnnnnnnnnnnnnnnnnnnnnnnnnnnnnnnnnnnnnnnnnnnnnnnnnnnnnnnnnnnnnnnnnnnnnnnnnnnnnnnnnnnnnnnnnnnnnnnnnnnnnnnnnnnnnnnnnnnnnnnnnnnnnnnnnnnnnnnnnnnnnnnnnnnnnnnnnnnnnnnnnnnnnnnnnnnnnnnnnnnnnnnnnnnnnnnnnnnnnnnnnnnnnnnnnnnnnnnnnnnnnnnnnnnnnnnnnnnnnnnnnnnnnnnnnnnnnnnnnnnnnnnnnnnnnnnnnnnnnnnnnnnnnnnnnnnnnnnnnnnnnnnnnnnnnnnnnnnnnnnnnnnnnnnnnnnnnnnnnnnnnnnnnnnnnnnnnnnnnnnnnnnnnnnnnnnnnnnnnnnnnnnnnnnnnnnnnnnnnnnnnnnnnnnnnnnnnnnnnnnnnnnnnnnnnnnnnnnnnnnnnnnnnnnnnnnnnnnnnnnnnnnnnnnnnnnnnnnnnnnnnnnnnnnnnnnnnnnnnnnnnnnnnnnnnnnnnnnnnnnnnnnnnnnnnnnnnnnnnnnnnnnnnnnnnnnnnnnnnnnnnnnnnnnnnnnnnnnnnnnnnnnnnnnnnnnnnnnnnnnnnnnnnnnnnnnnnnnnnnnnnnnnnnnnnnnnnnnnnnnnnnnnnnnnnnnnnnnnnnnnnnnnnnnnnnnnnnnnnnnnnnnnnnnnnnnnnnnnnnnnnnnnnnnnnnnnnnnnnnnnnnnnnnnnnnnnnnnnnnnnnnnnnnnnnnnnnnnnnnnnnnnnnnnnnnnnnnnnnnnnnnnnnnnnnnnnnnnnnnnnnnnnnnnnnnnnnnnnnnnnnnnnnnnnnnnnnnnnnnnnnnnnnnnnnnnnnnnnnnnnnnnnnnnnnnnnnnnnnnnnnnnnnnnnnnnnnnnnnnnnnnnnnnnnnnnnnnnnnnnnnnnnnnnnnnnnnnnnnnnnnnnnnnnnnnnnnnnnnnnnnnnnnnnnnnnnnnnnnnnnnnnnnnnnnnnnnnnnnnnnnnnnnnnnnnnnnnnnnnnnnnnnnnnnnnnnnnnnnnnnnnnnnnnnnnnnnnnnnnnnnnnnnnnnnnnnnnnnnnnnnnnnnnnnnnnnnnnnnnnnnnnnnnnnnnnnnnnnnnnnnnnnnnnnnnnnnnnnnnnnnnnnnnnnnnnnnnnnnnnnnnnnnnnnnnnnnnnnnnnnnnnnnnnnnnnnnnnnnnnnnnnnnnnnnnnnnnnnnnnnnnnnnnnnnnnnnnnnnnnnnnnnnnnnnnnnnnnnnnnnnnnnnnnnnnnnnnnnnnnnnnnnnnnnnnnnnnnnnnnnnnnnnnnnnnnnnnnnnnnnnnnnnnnnnnnnnnnnnnnnnnnnnnnnnnnnnnnnnnnnnnnnnnnnnnnnnnnnnnnnnnnnnnnnnnnnnnnnnnnnnnnnnnnnnnnnnnnnnnnnnnnnnnnnnnnnnnnnnnnnnnnnnnnnnnnnnnnnnnnnnnnnnnnnnnnnnnnnnnnnnnnnnnnnnnnnnnnnnnnnnnnnnnnnnnnnnnnnnnnnnnnnnnnnnnnnnnnnnnnnnnnnnnnnnnnnnnnnnnnnnnnnnnnnnnnnnnnnnnnnnnnnnnnnnnnnnnnnnnnnnnnnnnnnnnnnnnnnnnnnnnnnnnnnnnnnnnnnnnnnnnnnnnnnnnnnnnnnnnnnnnnnnnnnnnnnnnnnnnnnnnnnnnnnnnnnnnnnnnnnnnnnnnnnnnnnnnnnnnnnnnnnnnnnnnnnnnnnnnnnnnnnnnnnnnnnnnnnnnnnnnnnnnnnnnnnnnnnnnnnnnnnnnnnnnnnnnnnnnnnnnnnnnnnnnnnnnnnnnnnnnnnnnnnnnnnnnnnnnnnnnnnnnnnnnnnnnnnnnnnnnnnnnnnnnnnnnnnnnnnnnnnnnnnnnnnnnnnnnnnnnnnnnnnnnnnnnnnnnnnnnnnnnnnnnnnnnnnnnnnnnnnnnnnnnnnnnnnnnnnnnnnnnnnnnnnnnnnnnnnnnnnnnnnnnnnnnnnnnnnnnnnnnnnnnnnnnnnnnnnnnnnnnnnnnnnnnnnnnnnnnnnnnnnnnnnnnnnnnnnnnnnnnnnnnnnnnnnnnnnnnnnnnnnnnnnnnnnnnnnnnnnnnnnnnnnnnnnnnnnnnnnnnnnnnnnnnnnnnnnnnnnnnnnnnnnnnnnnnnnnnnnnnnnnnnnnnnnnnnnnnnnnnnnnnnnnnnnnnnnnnnnnnnnnnnnnnnnnnnnnnnnnnnnnnnnnnnnnnnnnnnnnnnnnnnnnnnnnnnnnnnnnnnnnnnnnnnnnnnnnnnnnnnnnnnnnnnnnnnnnnnnnnnnnnnnnnnnnnnnnnnnnnnnnnnnnnnnnnnnnnnnnnnnnnnnnnnnnnnnnnnnnnnnnnnnnnnnnnnnnnnnnnnnnnnnnnnnnnnnnnnnnnnnnnnnnnnnnnnnnnnnnnnnnnnnnnnnnnnnnnnnnnnnnnnnnnnnnnnnnnnnnnnnnnnnnnnnnnnnnnnnnnnnnnnnnnnnnnnnnnnnnnnnnnnnnnnnnnnnnnnnnnnnnnnnnnnnnnnnnnnnnnnnnnnnnnnnnnnnnnnnnnnnnnnnnnnnnnnnnnnnnnnnnnnnnnnnnnnnnnnnnnnnnnnnnnnnnnnnnnnnnnnnnnnnnnnnnnnnnnnnnnnnnnnnnnnnnnnnnnnnnnnnnnnnnnnnnnnnnnnnnnnnnnnnnnnnnnnnnnnnnnnnnnnnnnnnnnnnnnnnnnnnnnnnnnnnnnnnnnnnnnnnnnnnnnnnnnnnnnnnnnnnnnnnnnnnnnnnnnnnnnnnnnnnnnnnnnnnnnnnnnnnnnnnnnnnnnnnnnnnnnnnnnnnnnnnnnnnnnnnnnnnnnnnnnnnnnnnnnnnnnnnnnnnnnnnnnnnnnnnnnnnnnnnnnnnnnnnnnnnnnnnnnnnnnnnnnnnnnnnnnnnnnnnnnnnnnnnnnnnnnnnnnnnnnnnnnnnnnnnnnnnnnnnnnnnnnnnnnnnnnnnnnnnnnnnnnnnnnnnnnnnnnnnnnnnnnnnnnnnnnnnnnnnnnnnnnnnnnnnnnnnnnnnnnnnnnnnnnnnnnnnnnnnnnnnnnnnnnnnnnnnnnnnnnnnnnnnnnnnnnnnnnnnnnnnnnnnnnnnnnnnnnnnnnnnnnnnnnnnnnnnnnnnnnnnnnnnnnnnnnnnnnnnnnnnnnnnnnnnnnnnnnnnnnnnnnnnnnnnnnnnnnnnnnnnnnnnnnnnnnnnnnnnnnnnnnnnnnnnnnnnnnnnnnnnnnnnnnnnnnnnnnnnnnnnnnnnnnnnnnnnnnnnnnnnnnnnnnnnnnnnnnnnnnnnnnnnnnnnnnnnnnnnnnnnnnnnnnnnnnnnnnnnnnnnnnnnnnnnnnnnnnnnnnnnnnnnnnnnnnnnnnnnnnnnnnnnnnnnnnnnnnnnnnnnnnnnnnnnnnnnnnnnnnnnnnnnnnnnnnnnnnnnnnnnnnnnnnnnnnnnnnnnnnnnnnnnnnnnnnnnnnnnnnnnnnnnnnnnnnnnnnnnnnnnnnnnnnnnnnnnnnnnnnnnnnnnnnnnnnnnnnnnnnnnnnnnnnnnnnnnnnnnnnnnnnnnnnnnnnnnnnnnnnnnnnnnnnnnnnnnnnnnnnnnnnnnnnnnnnnnnnnnnnnnnnnnnnnnnnnnnnnnnnnnnnnnnnnnnnnnnnnnnnnnnnnnnnnnnnnnnnnnnnnnnnnnnnnnnnnnnnnnnnnnnnnnnnnnnnnnnnnnnnnnnnnnnnnnnnnnnnnnnnnnnnnnnnnnnnnnnnnnnnnnnnnnnnnnnnnnnnnnnnnnnnnnnnnnnnnnnnnnnnnnnnnnnnnnnnnnnnnnnnnnnnnnnnnnnnnnnnnnnnnnnnnnnnnnnnnnnnnnnnnnnnnnnnnnnnnnnnnnnnnnnnnnnnnnnnnnnnnnnnnnnnnnnnnnnnnnnnnnnnnnnnnnnnnnnnnnnnnnnnnnnnnnnnnnnnnnnnnnnnnnnnnnnnnnnnnnnnnnnnnnnnnnnnnnnnnnnnnnnnnnnnnnnnnnnnnnnnnnnnnnnnnnnnnnnnnnnnnnnnnnnnnnnnnnnnnnnnnnnnnnnnnnnnnnnnnnnnnnnnnnnnnnnnnnnnnnnnnnnnnnnnnnnnnnnnnnnnnnnnnnnnnnnnnnnnnnnnnnnnnnnnnnnnnnnnnnnnnnnnnnnnnnnnnnnnnnnnnnnnnnnnnnnnnnnnnnnnnnnnnnnnnnnnnnnnnnnnnnnnnnnnnnnnnnnnnnnnnnnnnnnnnnnnnnnnnnnnnnnnnnnnnnnnnnnnnnnnnnnnnnnnnnnnnnnnnnnnnnnnnnnnnnnnnnnnnnnnnnnnnnnnnnnnnnnnnnnnnnnnnnnnnnnnnnnnnnnnnnnnnnnnnnnnnnnnnnnnnnnnnnnnnnnnnnnnnnnnnnnnnnnnnnnnnnnnnnnnnnnnnnnnnnnnnnnnnnnnnnnnnnnnnnnnnnnnnnnnnnnnnnnnnnnnnnnnnnnnnnnnnnnnnnnnnnnnnnnnnnnnnnnnnnnnnnnnnnnnnnnnnnnnnnnnnnnnnnnnnnnnnnnnnnnnnnnnnnnnnnnnnnnnnnnnnnnnnnnnnnnnnnnnnnnnnnnnnnnnnnnnnnnnnnnnnnnnnnnnnnnnnnnnnnnnnnnnnnnnnnnnnnnnnnnnnnnnnnnnnnnnnnnnnnnnnnnnnnnnnnnnnnnnnnnnnnnnnnnnnnnnnnnnnnnnnnnnnnnnnnnnnnnnnnnnnnnnnnnnnnnnnnnnnnnnnnnnnnnnnnnnnnnnnnnnnnnnnnnnnnnnnnnnnnnnnnnnnnnnnnnnnnnnnnnnnnnnnnnnnnnnnnnnnnnnnnnnnnnnnnnnnnnnnnnnnnnnnnnnnnnnnnnnnnnnnnnnnnnnnnnnnnnnnnnnnnnnnnnnnnnnnnnnnnnnnnnnnnnnnnnnnnnnnnnnnnnnnnnnnnnnnnnnnnnnnnnnnnnnnnnnnnnnnnnnnnnnnnnnnnnnnnnnnnnnnnnnnnnnnnnnnnnnnnnnnnnnnnnnnnnnnnnnnnnnnnnnnnnnnnnnnnnnnnnnnnnnnnnnnnnnnnnnnnnnnnnnnnnnnnnnnnnnnnnnnnnnnnnnnnnnnnnnnnnnnnnnnnnnnnnnnnnnnnnnnnnnnnnnnnnnnnnnnnnnnnnnnnnnnnnnnnnnnnnnnnnnnnnnnnnnnnnnnnnnnnnnnnnnnnnnnnnnnnnnnnnnnnnnnnnnnnnnnnnnnnnnnnnnnnnnnnnnnnnnnnnnnnnnnnnnnnnnnnnnnnnnnnnnnnnnnnnnnnnnnnnnnnnnnnnnnnnnnnnnnnnnnnnnnnnnnnnnnnnnnnnnnnnnnnnnnnnnnnnnnnnnnnnnnnnnnnnnnnnnnnnnnnnnnnnnnnnnnnnnnnnnnnnnnnnnnnnnnnnnnnnnnnnnnnnnnnnnnnnnnnnnnnnnnnnnnnnnnnnnnnnnnnnnnnnnnnnnnnnnnnnnnnnnnnnnnnnnnnnnnnnnnnnnnnnnnnnnnnnnnnnnnnnnnnnnnnnnnnnnnnnnnnnnnnnnnnnnnnnnnnnnnnnnnnnnnnnnnnnnnnnnnnnnnnnnnnnnnnnnnnnnnnnnnnnnnnnnnnnnnnnnnnnnnnnnnnnnnnnnnnnnnnnnnnnnnnnnnnnnnnnnnnnnnnnnnnnnnnnnnnnnnnnnnnnnnnnnnnnnnnnnnnnnnnnnnnnnnnnnnnnnnnnnnnnnnnnnnnnnnnnnnnnnnnnnnnnnnnnnnnnnnnnnnnnnnnnnnnnnnnnnnnnnnnnnnnnnnnnnnnnnnnnnnnnnnnnnnnnnnnnnnnnnnnnnnnnnnnnnnnnnnnnnnnnnnnnnnnnnnnnnnnnnnnnnnnnnnnnnnnnnnnnnnnnnnnnnnnnnnnnnnnnnnnnnnnnnnnnnnnnnnnnnnnnnnnnnnnnnnnnnnnnnnnnnnnnnnnnnnnnnnnnnnnnnnnnnnnnnnnnnnnnnnnnnnnnnnnnnnnnnnnnnnnnnnnnnnnnnnnnnnnnnnnnnnnnnnnnnnnnnnnnnnnnnnnnnnnnnnnnnnnnnnnnnnnnnnnnnnnnnnnnnnnnnnnnnnnnnnnnnnnnnnnnnnnnnnnnnnnnnnnnnnnnnnnnnnnnnnnnnnnnnnnnnnnnnnnnnnnnnnnnnnnnnnnnnnnnnnnnnnnnnnnnnnnnnnnnnnnnnnnnnnnnnnnnnnnnnnnnnnnnnnnnnnnnnnnnnnnnnnnnnnnnnnnnnnnnnnnnnnnnnnnnnnnnnnnnnnnnnnnnnnnnnnnnnnnnnnnnnnnnnnnnnnnnnnnnnnnnnnnnnnnnnnnnnnnnnnnnnnnnnnnnnnnnnnnnnnnnnnnnnnnnnnnnnnnnnnnnnnnnnnnnnnnnnnnnnnnnnnnnnnnnnnnnnnnnnnnnnnnnnnnnnnnnnnnnnnnnnnnnnnnnnnnnnnnnnnnnnnnnnnnnnnnnnnnnnnnnnnnnnnnnnnnnnnnnnnnnnnnnnnnnnnnnnnnnnnnnnnnnnnnnnnnnnnnnnnnnnnnnnnnnnnnnnnnnnnnnnnnnnnnnnnnnnnnnnnnnnnnnnnnnnnnnnnnnnnnnnnnnnnnnnnnnnnnnnnnnnnnnnnnnnnnnnnnnnnnnnnnnnnnnnnnnnnnnnnnnnnnnnnnnnnnnnnnnnnnnnnnnnnnnnnnnnnnnnnnnnnnnnnnnnnnnnnnnnnnnnnnnnnnnnnnnnnnnnnnnnnnnnnnnnnnnnnnnnnnnnnnnnnnnnnnnnnnnnnnnnnnnnnnnnnnnnnnnnnnnnnnnnnnnnnnnnnnnnnnnnnnnnnnnnnnnnnnnnnnnnnnnnnnnnnnnnnnnnnnnnnnnnnnnnnnnnnnnnnnnnnnnnnnnnnnnnnnnnnnnnnnnnnnnnnnnnnnnnnnnnnnnnnnnnnnnnnnnnnnnnnnnnnnnnnnnnnnnnnnnnnnnnnnnnnnnnnnnnnnnnnnnnnnnnnnnnnnnnnnnnnnnnnnnnnnnnnnnnnnnnnnnnnnnnnnnnnnnnnnnnnnnnnnnnnnnnnnnnnnnnnnnnnnnnnnnnnnnnnnnnnnnnnnnnnnnnnnnnnnnnnnnnnnnnnnnnnnnnnnnnnnnnnnnnnnnnnnnnnnnnnnnnnnnnnnnnnnnnnnnnnnnnnnnnnnnnnnnnnnnnnnnnnnnnnnnnnnnnnnnnnnnnnnnnnnnnnnnnnnnnnnnnnnnnnnnnnnnnnnnnnnnnnnnnnnnnnnnnnnnnnnnnnnnnnnnnnnnnnnnnnnnnnnnnnnnnnnnnnnnnnnnnnnnnnnnnnnnnnnnnnnnnnnnnnnnnnnnnnnnnnnnnnnnnnnnnnnnnnnnnnnnnnnnnnnnnnnnnnnnnnnnnnnnnnnnnnnnnnnnnnnnnnnnnnnnnnnnnnnnnnnnnnnnnnnnnnnnnnnnnnnnnnnnnnnnnnnnnnnnnnnnnnnnnnnnnnnnnnnnnnnnnnnnnnnnnnnnnnnnnnnnnnnnnnnnnnnnnnnnnnnnnnnnnnnnnnnnnnnnnnnnnnnnnnnnnnnnnnnnnnnnnnnnnnnnnnnnnnnnnnnnnnnnnnnnnnnnnnnnnnnnnnnnnnnnnnnnnnnnnnnnnnnnnnnnnnnnnnnnnnnnnnnnnnnnnnnnnnnnnnnnnnnnnnnnnnnnnnnnnnnnnnnnnnnnnnnnnnnnnnnnnnnnnnnnnnnnnnnnnnnnnnnnnnnnnnnnnnnnnnnnnnnnnnnnnnnnnnnnnnnnnnnnnnnnnnnnnnnnnnnnnnnnnnnnnnnnnnnnnnnnnnnnnnnnnnnnnnnnnnnnnnnnnnnnnnnnnnnnnnnnnnnnnnnnnnnnnnnnnnnnnnnnnnnnnnnnnnnnnnnnnnnnnnnnnnnnnnnnnnnnnnnnnnnnnnnnnnnnnnnnnnnnnnnnnnnnnnnnnnnnnnnnnnnnnnnnnnnnnnnnnnnnnnnnnnnnnnnnnnnnnnnnnnnnnnnnnnnnnnnnnnnnnnnnnnnnnnnnnnnnnnnnnnnnnnnnnnnnnnnnnnnnnnnnnnnnnnnnnnnnnnnnnnnnnnnnnnnnnnnnnnnnnnnnnnnnnnnnnnnnnnnnnnnnnnnnnnnnnnnnnnnnnnnnnnnnnnnnnnnnnnnnnnnnnnnnnnnnnnnnnnnnnnnnnnnnnnnnnnnnnnnnnnnnnnnnnnnnnnnnnnnnnnnnnnnnnnnnnnnnnnnnnnnnnnnnnnnnnnnnnnnnnnnnnnnnnnnnnnnnnnnnnnnnnnnnnnnnnnnnnnnnnnnnnnnnnnnnnnnnnnnnnnnnnnnnnnnnnnnnnnnnnnnnnnnnnnnnnnnnnnnnnnnnnnnnnnnnnnnnnnnnnnnnnnnnnnnnnnnnnnnnnnnnnnnnnnnnnnnnnnnnnnnnnnnnnnnnnnnnnnnnnnnnnnnnnnnnnnnnnnnnnnnnnnnnnnnnnnnnnnnnnnnnnnnnnnnnnnnnnnnnnnnnnnnnnnnnnnnnnnnnnnnnnnnnnnnnnnnnnnnnnnnnnnnnnnnnnnnnnnnnnnnnnnnnnnnnnnnnnnnnnnnnnnnnnnnnnnnnnnnnnnnnnnnnnnnnnnnnnnnnnnnnnnnnnnnnnnnnnnnnnnnnnnnnnnnnnnnnnnnnnnnnnnnnnnnnnnnnnnnnnnnnnnnnnnnnnnnnnnnnnnnnnnnnnnnnnnnnnnnnnnnnnnnnnnnnnnnnnnnnnnnnnnnnnnnnnnnnnnnnnnnnnnnnnnnnnnnnnnnnnnnnnnnnnnnnnnnnnnnnnnnnnnnnnnnnnnnnnnnnnnnnnnnnnnnnnnnnnnnnnnnnnnnnnnnnnnnnnnnnnnnnnnnnnnnnnnnnnnnnnnnnnnnnnnnnnnnnnnnnnnnnnnnnnnnnnnnnnnnnnnnnnnnnnnnnnnnnnnnnnnnnnnnnnnnnnnnnnnnnnnnnnnnnnnnnnnnnnnnnnnnnnnnnnnnnnnnnnnnnnnnnnnnnnnnnnnnnnnnnnnnnnnnnnnnnnnnnnnnnnnnnnnnnnnnnnnnnnnnnnnnnnnnnnnnnnnnnnnnnnnnnnnnnnnnnnnnnnnnnnnnnnnnnnnnnnnnnnnnnnnnnnnnnnnnnnnnnnnnnnnnnnnnnnnnnnnnnnnnnnnnnnnnnnnnnnnnnnnnnnnnnnnnnnnnnnnnnnnnnnnnnnnnnnnnnnnnnnnnnnnnnnnnnnnnnnnnnnnnnnnnnnnnnnnnnnnnnnnnnnnnnnnnnnnnnnnnnnnnnnnnnnnnnnnnnnnnnnnnnnnnnnnnnnnnnnnnnnnnnnnnnnnnnnnnnnnnnnnnnnnnnnnnnnnnnnnnnnnnnnnnnnnnnnnagaagaagcggctgggtaactctgagccttatggactgcggcgtgaaggacagcgacctccgcacgcttctcgacgcgccgggtgtcgaacagcttcaggggctgaacctcagcggaaatcagctttccacgcttcccccggagatcggccgcctcaccgcactcgataggctgtacctcgtcaacaatcagctttccgcgcagccgacttcgtcggccgccctgccagacagtcaacaatatcagcacataacgattctatacagcacgaccgaattttcccaccttcctgtaggtccggaataattccgggccctcgagtttctacattatcacgcggcagcggcggcagccagacccctttctgagcaacgtatgcctaagcgtaggtccggaataattccgggccctcgagtttctacattatcacgcggcagcggcggcagccagagccctttctgagcaatgtatgcctaagcgtaggtccggaataattccggacccacattcagcaaaaattatgtcgtcatatataaaggcagcgcggcccagctgtggtttgaggagaatctccgctcacgtatactcaccctggcccattcagcccttccggcttggcgagacaattcatcgagcctcccaataccgccgctgaccccaacttccacatcaaaatcgctcacttagataacccctcaatctacttgatttaaacagaacccccgcgtagactcactgcagggcgcgcaaaaaggggctgtctatgaactcgtacaacttgctttcccaaaactggattcccgttctctatcacaatggcgatttcaaacgcgtcggtatcctcaaagcattccaagacgcacacagaatccgccaagtcgccgcatccaatcccatggaccgcctcgccatactccgctttctcctcgccctgctctactggtgcaagggaaacccggcgaacggcccacaggccgcgccttacgaaccattccctccggattggttcttgaaactcgaacagaataaagaatgctttgacttgtttggagagacccggcgattttatcagtacaagaaacctgtgggcgaagataaacggctgaccgccaactaccttgtccatgaggtgccgaccggtacgaatgcgtggcattttaggcattcaacggacgaagtaaacggtttgtgtcgcgcatgttgtgcaatgggcttgctaaggcttccagcatttgcgacttccggtgggcgtggtaaaccgcctggaatcaactcaaagcctcccctttacgtcataccgctgcgcggttcacttgcggccactgtacggctttcctggcggccggtcggcccgttaggaacgcccgcatgggaaaaaccggacgtccaactgcctggcataggcgaggtgccactgctcacaggtttgacctggctgccgcggcgagtgtggttagactctcctgcggaacgggcagaaacctgcatctcatgcgggcgcagcgagaggctaatcctgcgtactgtatttgccccaattggcagcaccaagacggaagaaggagaaccggtcagggcgtggtgcgacccgcatgtcatctacgggatgtccgccaagggcgaaatcagcagcctgcatgcgcgggacgctcttggcgcaccagacgccgcggcggggcagtgggccaatatccttgccggcctgcttcgaaaggggcaaacaggaaacgcatctccttgctggatagtgggcttttctaccgtccagaacgacaagtatcttgaggctgtcgaatgccagatcccttgcgatatcgaccaggcgccacaagaacagcgggacgaatgcctcaacaacttggaacaatggcgcaagggaaaatggggtttcgccaaaaacctgggatcggacaacgaaaagggcgagcggcgtgagcatcgagagattacctctatgcttgcgtccattggaccgcacgttgaaaagcaggtgtcggagaaaagtggatcgttgatagcgggcggcgaaaccgcatggcaggaagcggccaaggcgttccgcccgatgatgcgcttagccgcacaatcgctgtccccagggtttacgatccaagcagccagaatacgcaagcgcattgccaatgccatgccaaacatgacacccaaggccgcgaagaaggggcggggaaaaggacgggataaatgaccgcgacggaagaattcattcgcgtattgagtggcctcaagtcaggggatcttggtctgctgcggacttattcccaacacggcttggatgaatccgtggatgggtttgacctcttttcggggctttggtggccgttacgggcgaagaaccagcgggcgccgcgccgggaagtggcgtggcttatagctaaactctacgctgcccacccaattccccaggcccgcgaggccacgcttgcgcgtcaactccgccggtgcctcccgaccgatgagaacggtagaaatcggtttgggcggaagctcgacaacatattgatgctgccgctcgacaagatcgaggcggaacttcgttgggcgatcgggcaggttgcctcgagaggactttcactcgattgggtaagactcacggatgaactctccgtgtgggaatacgaatccgtccacctgcgatgggcggaacaattccttcaaaccgaagattaaggatgaaaggggtccatcatgctgatcgagattcacgcaatacaaaaccatagtccgtcaaacctaaatcgggacgacctgggtgcgccgaagacgtgctattttggcggtgctctgcgctcgcgcatctcaagtcaatgcatcaaacgaagcatccggatgagcagggagttccaagcgctttgcgggggaattcgcacgcgccagttggccagactgatcgccgagaaggttcaagggaagccagacgtccagaagcgcgccgagaagatactcgaactatgcggtttcaagcccaagaaggcgaagaaggaagaaacggacgacgcagcagatagcgaaaaaagcaagatgctcgtttatacgagccgccaagccatcgaggaaatggccgcactactccaaaacggggacggaaggactgagaaacaactggccgcggacttctgcgcgttgatcagtaagcatgtggcagtccccgatatggcactatccggacggatgctggagccggacaaatcttcaaacgacctttggaaggagcttgacaagaccgtcgaggccgcccttcaggttgctcacgcgatttcaacgcacgaggcgctgcccgaggtggactattatgtggccgccgatgacattccaggcgaagatgcaggggcgggctacgtggatgaatccatgtttgcctcggcatgtttctacaagtacttctcgatcaattgggacaagcttgtggaaaacctcaatggccagaaagaacttgccgcacatacggtaggggcttttatccgtggagcagcgctggcaaatccttcgggcaaacagaatagttttgcggcgcacaatccgcccgatggcctgctgatccaattcgccgacaccccgacgagctatgcgaatgccttcgccgctcccgtgtcgggcaagggcaatcctgacgtcatttcacaaagtgtggcgcagttggcgcattatgttcgcgacttggacacggggtacggcaagccccagaagcgtttctggttctcgccgaatctgcgttatccgctttgcgtcatcgaagccaagaaaacgattccggtggccgaggtaaacctcaaatcgctcgatcaactgattccggccgtcatcggcggcttgggctttgattggaattcggttcagaagaaagtgacaagccaacaggtggcgccatgacggccaacacgctgtttcttcggtttgaaggaccgctgcaggcgtggggtaatcaggagtcgaagttcgttgtacggcgcacggctgaagggcccactaaatcgggcgtgatcggactgttgtgtgcggctttgggcgtgacgcgggcggaagcgcaggaatgccggttgcctcaactggccgaactgcgtatgggcgtccgggtggatgcgcccggataccggtggtgggactatcacacggtaggcgcggggatggacatgcgcatcgccgaagccgaggggaagacaaaacccggcgcaatgctcacgcggcgggagtatctttgcgacgccactttcctggtggtgcttcaggggaatccggccctgatcaaagaactccggcaggtgatcgaaaagccgcgctggacgctctatttgggcaggaaatgctgtccgccgtcgcggcgggtgctcgaggaggcgccggcggcgcatccggacctgatttcggcgcttgtgtcggttccgtggcagcggcgctttgaaagggataatcccccggaaacactcgagtatctgctggattggtttccgtcgcccgaccagccggaggcgccggatgacgccgaggtgtggtacgacgtgccgttgacgttcgagccgccgtcgcatggtgcgcgctttgttgtgcgcgggcagttccgcgtgggcgccggggggcaggtcccggtggcggaatcggcgttgcagcgccaggtgccctcgccacaacgcccgcgggcagattatggcaattccgagtaccggaagatgcgcgcgcagcggctcgagaaggactcgcatctttgcgtgttctgcagatcgcgtgcaacgaccgtgcagcacgtcacgtaccgccacgccggcggcgatgagcggatcggcgagctgcgttccctttgccgcttgtgccacgacgccgtcaccatgctcgagtatgggctgaacatggggctggaccgcatcgacccggaggatgctcgatggcgggagcggattatcgagaaacgcgacgagatcgtcaagttccggtcgctcgagacgcggcggcgtcggcttagccccgaggaggtcgagtgatgtatctatcgagtctgatgatcaacaccggcgacaatccggatcgggagcggccgggccggcggtggctgcgcgacatctaccacgtccaccagcggctgtcgatggcgtttccatcgaggtcgcacggaagcccgtccggttttctgttccgcatcgacaaccagatcgaggagaactcgccgcgcgcgatcgttcttgttcagtctcaattggccccggactgggatagcgcattttacaatgcgggcatgcttctggcggcgccgccggaggttcgcgaatatgccccgtctttcgcgcccggcgaccaccttcggtttcgcatcagaatgaatttaagcaagaagaccaagacggcgcgcgatggtacagatctgtgcacgccgcacgagggtgtcgacaccttcggccgccccaaatctcagtcgaaacgcgtggccgtgacctgggacggcgatcaaggcgaaaccccggaccgggcaatccgccaatggtttgccgcgaaggcccaacacgccgggtttgcactccagaacgaattcaacgtggttcacctcggctgggtggcgggacacaagccgggaacggccgagaaccggctgcggtttcgttccgcgctgctcgagggagacttgacggtggcggacgggccggctttcatgctatcggtcgagagcgggctgggctcggcgaaagggtttgggttcgggctgctgtctgtggttcgtgcaggcgggacgcccgcaccacaatcgaggcgtggcgaatgctgacgcgtgacttgcacgacctcgccaaggtgcgcgaccggctcagctacctttatgtcgagcacgcccggatcgatcaggaagacaaagccatcgccattcacgacgcccagggactcaccccggtgccgtgcgccacgctcgccctgttgatgctggggcccggcaccgccatcacacacgccgccgtcctcgccctcgccgacaacggctgcctcgtcgtgtggtgcggcgagcagggggtccggttctatgccgcggggcacggaaccacgcgaaactcccagaaccttctgctccaggcgcgcctctcgagccgccgctccacgcgcctcgccgtggttcgccgcctgtacgagatgcgctttccgggaaagctcgattcgagtctgacgctccaacagatccgcggcatggaaggcgtgcgcgtgcgcgaagcctactcgagcctgtcccgccaattcggcataccgtggacgggccgggcgtacgaccgccagaactggcgcgacgccgatcccgtcaaccgcgctctctccaccgccaattcctgcctctacggaatctgccacgccgccatagtcggcgcaggctattcgcccgcgctcgggttcatccacaccggcaaacagttgtcgtttgtctacgatatcgccgacctatacaaggccacgaccaccgcccccgccgcgttcgaaaccgccgcccgctcggcccgaaacatcgagcgagaggtccgaatcctgtgccgcgatgcttttgcggcgcagcgcctcctcgaacgcgttgtgaaggacctcgagtacgcgctggacgtgaagccggccgatgacgacgaagccgagaccgatttcgactcggatcccggcacgcccggaggcctgtgggaccctgacgccggcgaagtggccggcggcgtgtcctatgccgaacccgacgaacacacagaggatgaaccctaatggtcgtcatggtgctcgaacgcgtatcgccttcgctccgcggtgaactcactcgatggctgctcgaaccaaaatccggcgtgtttgtcggcaccgtctccgccatggtaagagaaaaactatgggaaaaggtttgccggaaaaccggcgaaggaggatctatcctcatttggaccgcaaataacgaacaggggttcaaaatcgacttctggggcgatccctcgagacacgtcctcagttgggatggacttcagctcattacaaagccaaaataaccaataaataccaagtgtaatccccacgcgcgtggggatgaaccgtcctggttgttatgcgctcgcccgcctccttcgt

SEQ ID NO: 1116 - DNA, 103288 bp, Artificial Sequence
  Synthetic Oligonucleotide
  misc_feature (1)..(96259): n is a, c, g, or t
nnnnnnnnnnnnnnnnnnnnnnnnnnnnnnnnnnnnnnnnnnnnnnnnnnnnnnnnnnnnnnnnnnnnnnnnnnnnnnnnnnnnnnnnnnnnnnnnnnnnnnnnnnnnnnnnnnnnnnnnnnnnnnnnnnnnnnnnnnnnnnnnnnnnnnnnnnnnnnnnnnnnnnnnnnnnnnnnnnnnnnnnnnnnnnnnnnnnnnnnnnnnnnnnnnnnnnnnnnnnnnnnnnnnnnnnnnnnnnnnnnnnnnnnnnnnnnnnnnnnnnnnnnnnnnnnnnnnnnnnnnnnnnnnnnnnnnnnnnnnnnnnnnnnnnnnnnnnnnnnnnnnnnnnnnnnnnnnnnnnnnnnnnnnnnnnnnnnnnnnnnnnnnnnnnnnnnnnnnnnnnnnnnnnnnnnnnnnnnnnnnnnnnnnnnnnnnnnnnnnnnnnnnnnnnnnnnnnnnnnnnnnnnnnnnnnnnnnnnnnnnnnnnnnnnnnnnnnnnnnnnnnnnnnnnnnnnnnnnnnnnnnnnnnnnnnnnnnnnnnnnnnnnnnnnnnnnnnnnnnnnnnnnnnnnnnnnnnnnnnnnnnnnnnnnnnnnnnnnnnnnnnnnnnnnnnnnnnnnnnnnnnnnnnnnnnnnnnnnnnnnnnnnnnnnnnnnnnnnnnnnnnnnnnnnnnnnnnnnnnnnnnnnnnnnnnnnnnnnnnnnnnnnnnnnnnnnnnnnnnnnnnnnnnnnnnnnnnnnnnnnnnnnnnnnnnnnnnnnnnnnnnnnnnnnnnnnnnnnnnnnnnnnnnnnnnnnnnnnnnnnnnnnnnnnnnnnnnnnnnnnnnnnnnnnnnnnnnnnnnnnnnnnnnnnnnnnnnnnnnnnnnnnnnnnnnnnnnnnnnnnnnnnnnnnnnnnnnnnnnnnnnnnnnnnnnnnnnnnnnnnnnnnnnnnnnnnnnnnnnnnnnnnnnnnnnnnnnnnnnnnnnnnnnnnnnnnnnnnnnnnnnnnnnnnnnnnnnnnnnnnnnnnnnnnnnnnnnnnnnnnnnnnnnnnnnnnnnnnnnnnnnnnnnnnnnnnnnnnnnnnnnnnnnnnnnnnnnnnnnnnnnnnnnnnnnnnnnnnnnnnnnnnnnnnnnnnnnnnnnnnnnnnnnnnnnnnnnnnnnnnnnnnnnnnnnnnnnnnnnnnnnnnnnnnnnnnnnnnnnnnnnnnnnnnnnnnnnnnnnnnnnnnnnnnnnnnnnnnnnnnnnnnnnnnnnnnnnnnnnnnnnnnnnnnnnnnnnnnnnnnnnnnnnnnnnnnnnnnnnnnnnnnnnnnnnnnnnnnnnnnnnnnnnnnnnnnnnnnnnnnnnnnnnnnnnnnnnnnnnnnnnnnnnnnnnnnnnnnnnnnnnnnnnnnnnnnnnnnnnnnnnnnnnnnnnnnnnnnnnnnnnnnnnnnnnnnnnnnnnnnnnnnnnnnnnnnnnnnnnnnnnnnnnnnnnnnnnnnnnnnnnnnnnnnnnnnnnnnnnnnnnnnnnnnnnnnnnnnnnnnnnnnnnnnnnnnnnnnnnnnnnnnnnnnnnnnnnnnnnnnnnnnnnnnnnnnnnnnnnnnnnnnnnnnnnnnnnnnnnnnnnnnnnnnnnnnnnnnnnnnnnnnnnnnnnnnnnnnnnnnnnnnnnnnnnnnnnnnnnnnnnnnnnnnnnnnnnnnnnnnnnnnnnnnnnnnnnnnnnnnnnnnnnnnnnnnnnnnnnnnnnnnnnnnnnnnnnnnnnnnnnnnnnnnnnnnnnnnnnnnnnnnnnnnnnnnnnnnnnnnnnnnnnnnnnnnnnnnnnnnnnnnnnnnnnnnnnnnnnnnnnnnnnnnnnnnnnnnnnnnnnnnnnnnnnnnnnnnnnnnnnnnnnnnnnnnnnnnnnnnnnnnnnnnnnnnnnnnnnnnnnnnnnnnnnnnnnnnnnnnnnnnnnnnnnnnnnnnnnnnnnnnnnnnnnnnnnnnnnnnnnnnnnnnnnnnnnnnnnnnnnnnnnnnnnnnnnnnnnnnnnnnnnnnnnnnnnnnnnnnnnnnnnnnnnnnnnnnnnnnnnnnnnnnnnnnnnnnnnnnnnnnnnnnnnnnnnnnnnnnnnnnnnnnnnnnnnnnnnnnnnnnnnnnnnnnnnnnnnnnnnnnnnnnnnnnnnnnnnnnnnnnnnnnnnnnnnnnnnnnnnnnnnnnnnnnnnnnnnnnnnnnnnnnnnnnnnnnnnnnnnnnnnnnnnnnnnnnnnnnnnnnnnnnnnnnnnnnnnnnnnnnnnnnnnnnnnnnnnnnnnnnnnnnnnnnnnnnnnnnnnnnnnnnnnnnnnnnnnnnnnnnnnnnnnnnnnnnnnnnnnnnnnnnnnnnnnnnnnnnnnnnnnnnnnnnnnnnnnnnnnnnnnnnnnnnnnnnnnnnnnnnnnnnnnnnnnnnnnnnnnnnnnnnnnnnnnnnnnnnnnnnnnnnnnnnnnnnnnnnnnnnnnnnnnnnnnnnnnnnnnnnnnnnnnnnnnnnnnnnnnnnnnnnnnnnnnnnnnnnnnnnnnnnnnnnnnnnnnnnnnnnnnnnnnnnnnnnnnnnnnnnnnnnnnnnnnnnnnnnnnnnnnnnnnnnnnnnnnnnnnnnnnnnnnnnnnnnnnnnnnnnnnnnnnnnnnnnnnnnnnnnnnnnnnnnnnnnnnnnnnnnnnnnnnnnnnnnnnnnnnnnnnnnnnnnnnnnnnnnnnnnnnnnnnnnnnnnnnnnnnnnnnnnnnnnnnnnnnnnnnnnnnnnnnnnnnnnnnnnnnnnnnnnnnnnnnnnnnnnnnnnnnnnnnnnnnnnnnnnnnnnnnnnnnnnnnnnnnnnnnnnnnnnnnnnnnnnnnnnnnnnnnnnnnnnnnnnnnnnnnnnnnnnnnnnnnnnnnnnnnnnnnnnnnnnnnnnnnnnnnnnnnnnnnnnnnnnnnnnnnnnnnnnnnnnnnnnnnnnnnnnnnnnnnnnnnnnnnnnnnnnnnnnnnnnnnnnnnnnnnnnnnnnnnnnnnnnnnnnnnnnnnnnnnnnnnnnnnnnnnnnnnnnnnnnnnnnnnnnnnnnnnnnnnnnnnnnnnnnnnnnnnnnnnnnnnnnnnnnnnnnnnnnnnnnnnnnnnnnnnnnnnnnnnnnnnnnnnnnnnnnnnnnnnnnnnnnnnnnnnnnnnnnnnnnnnnnnnnnnnnnnnnnnnnnnnnnnnnnnnnnnnnnnnnnnnnnnnnnnnnnnnnnnnnnnnnnnnnnnnnnnnnnnnnnnnnnnnnnnnnnnnnnnnnnnnnnnnnnnnnnnnnnnnnnnnnnnnnnnnnnnnnnnnnnnnnnnnnnnnnnnnnnnnnnnnnnnnnnnnnnnnnnnnnnnnnnnnnnnnnnnnnnnnnnnnnnnnnnnnnnnnnnnnnnnnnnnnnnnnnnnnnnnnnnnnnnnnnnnnnnnnnnnnnnnnnnnnnnnnnnnnnnnnnnnnnnnnnnnnnnnnnnnnnnnnnnnnnnnnnnnnnnnnnnnnnnnnnnnnnnnnnnnnnnnnnnnnnnnnnnnnnnnnnnnnnnnnnnnnnnnnnnnnnnnnnnnnnnnnnnnnnnnnnnnnnnnnnnnnnnnnnnnnnnnnnnnnnnnnnnnnnnnnnnnnnnnnnnnnnnnnnnnnnnnnnnnnnnnnnnnnnnnnnnnnnnnnnnnnnnnnnnnnnnnnnnnnnnnnnnnnnnnnnnnnnnnnnnnnnnnnnnnnnnnnnnnnnnnnnnnnnnnnnnnnnnnnnnnnnnnnnnnnnnnnnnnnnnnnnnnnnnnnnnnnnnnnnnnnnnnnnnnnnnnnnnnnnnnnnnnnnnnnnnnnnnnnnnnnnnnnnnnnnnnnnnnnnnnnnnnnnnnnnnnnnnnnnnnnnnnnnnnnnnnnnnnnnnnnnnnnnnnnnnnnnnnnnnnnnnnnnnnnnnnnnnnnnnnnnnnnnnnnnnnnnnnnnnnnnnnnnnnnnnnnnnnnnnnnnnnnnnnnnnnnnnnnnnnnnnnnnnnnnnnnnnnnnnnnnnnnnnnnnnnnnnnnnnnnnnnnnnnnnnnnnnnnnnnnnnnnnnnnnnnnnnnnnnnnnnnnnnnnnnnnnnnnnnnnnnnnnnnnnnnnnnnnnnnnnnnnnnnnnnnnnnnnnnnnnnnnnnnnnnnnnnnnnnnnnnnnnnnnnnnnnnnnnnnnnnnnnnnnnnnnnnnnnnnnnnnnnnnnnnnnnnnnnnnnnnnnnnnnnnnnnnnnnnnnnnnnnnnnnnnnnnnnnnnnnnnnnnnnnnnnnnnnnnnnnnnnnnnnnnnnnnnnnnnnnnnnnnnnnnnnnnnnnnnnnnnnnnnnnnnnnnnnnnnnnnnnnnnnnnnnnnnnnnnnnnnnnnnnnnnnnnnnnnnnnnnnnnnnnnnnnnnnnnnnnnnnnnnnnnnnnnnnnnnnnnnnnnnnnnnnnnnnnnnnnnnnnnnnnnnnnnnnnnnnnnnnnnnnnnnnnnnnnnnnnnnnnnnnnnnnnnnnnnnnnnnnnnnnnnnnnnnnnnnnnnnnnnnnnnnnnnnnnnnnnnnnnnnnnnnnnnnnnnnnnnnnnnnnnnnnnnnnnnnnnnnnnnnnnnnnnnnnnnnnnnnnnnnnnnnnnnnnnnnnnnnnnnnnnnnnnnnnnnnnnnnnnnnnnnnnnnnnnnnnnnnnnnnnnnnnnnnnnnnnnnnnnnnnnnnnnnnnnnnnnnnnnnnnnnnnnnnnnnnnnnnnnnnnnnnnnnnnnnnnnnnnnnnnnnnnnnnnnnnnnnnnnnnnnnnnnnnnnnnnnnnnnnnnnnnnnnnnnnnnnnnnnnnnnnnnnnnnnnnnnnnnnnnnnnnnnnnnnnnnnnnnnnnnnnnnnnnnnnnnnnnnnnnnnnnnnnnnnnnnnnnnnnnnnnnnnnnnnnnnnnnnnnnnnnnnnnnnnnnnnnnnnnnnnnnnnnnnnnnnnnnnnnnnnnnnnnnnnnnnnnnnnnnnnnnnnnnnnnnnnnnnnnnnnnnnnnnnnnnnnnnnnnnnnnnnnnnnnnnnnnnnnnnnnnnnnnnnnnnnnnnnnnnnnnnnnnnnnnnnnnnnnnnnnnnnnnnnnnnnnnnnnnnnnnnnnnnnnnnnnnnnnnnnnnnnnnnnnnnnnnnnnnnnnnnnnnnnnnnnnnnnnnnnnnnnnnnnnnnnnnnnnnnnnnnnnnnnnnnnnnnnnnnnnnnnnnnnnnnnnnnnnnnnnnnnnnnnnnnnnnnnnnnnnnnnnnnnnnnnnnnnnnnnnnnnnnnnnnnnnnnnnnnnnnnnnnnnnnnnnnnnnnnnnnnnnnnnnnnnnnnnnnnnnnnnnnnnnnnnnnnnnnnnnnnnnnnnnnnnnnnnnnnnnnnnnnnnnnnnnnnnnnnnnnnnnnnnnnnnnnnnnnnnnnnnnnnnnnnnnnnnnnnnnnnnnnnnnnnnnnnnnnnnnnnnnnnnnnnnnnnnnnnnnnnnnnnnnnnnnnnnnnnnnnnnnnnnnnnnnnnnnnnnnnnnnnnnnnnnnnnnnnnnnnnnnnnnnnnnnnnnnnnnnnnnnnnnnnnnnnnnnnnnnnnnnnnnnnnnnnnnnnnnnnnnnnnnnnnnnnnnnnnnnnnnnnnnnnnnnnnnnnnnnnnnnnnnnnnnnnnnnnnnnnnnnnnnnnnnnnnnnnnnnnnnnnnnnnnnnnnnnnnnnnnnnnnnnnnnnnnnnnnnnnnnnnnnnnnnnnnnnnnnnnnnnnnnnnnnnnnnnnnnnnnnnnnnnnnnnnnnnnnnnnnnnnnnnnnnnnnnnnnnnnnnnnnnnnnnnnnnnnnnnnnnnnnnnnnnnnnnnnnnnnnnnnnnnnnnnnnnnnnnnnnnnnnnnnnnnnnnnnnnnnnnnnnnnnnnnnnnnnnnnnnnnnnnnnnnnnnnnnnnnnnnnnnnnnnnnnnnnnnnnnnnnnnnnnnnnnnnnnnnnnnnnnnnnnnnnnnnnnnnnnnnnnnnnnnnnnnnnnnnnnnnnnnnnnnnnnnnnnnnnnnnnnnnnnnnnnnnnnnnnnnnnnnnnnnnnnnnnnnnnnnnnnnnnnnnnnnnnnnnnnnnnnnnnnnnnnnnnnnnnnnnnnnnnnnnnnnnnnnnnnnnnnnnnnnnnnnnnnnnnnnnnnnnnnnnnnnnnnnnnnnnnnnnnnnnnnnnnnnnnnnnnnnnnnnnnnnnnnnnnnnnnnnnnnnnnnnnnnnnnnnnnnnnnnnnnnnnnnnnnnnnnnnnnnnnnnnnnnnnnnnnnnnnnnnnnnnnnnnnnnnnnnnnnnnnnnnnnnnnnnnnnnnnnnnnnnnnnnnnnnnnnnnnnnnnnnnnnnnnnnnnnnnnnnnnnnnnnnnnnnnnnnnnnnnnnnnnnnnnnnnnnnnnnnnnnnnnnnnnnnnnnnnnnnnnnnnnnnnnnnnnnnnnnnnnnnnnnnnnnnnnnnnnnnnnnnnnnnnnnnnnnnnnnnnnnnnnnnnnnnnnnnnnnnnnnnnnnnnnnnnnnnnnnnnnnnnnnnnnnnnnnnnnnnnnnnnnnnnnnnnnnnnnnnnnnnnnnnnnnnnnnnnnnnnnnnnnnnnnnnnnnnnnnnnnnnnnnnnnnnnnnnnnnnnnnnnnnnnnnnnnnnnnnnnnnnnnnnnnnnnnnnnnnnnnnnnnnnnnnnnnnnnnnnnnnnnnnnnnnnnnnnnnnnnnnnnnnnnnnnnnnnnnnnnnnnnnnnnnnnnnnnnnnnnnnnnnnnnnnnnnnnnnnnnnnnnnnnnnnnnnnnnnnnnnnnnnnnnnnnnnnnnnnnnnnnnnnnnnnnnnnnnnnnnnnnnnnnnnnnnnnnnnnnnnnnnnnnnnnnnnnnnnnnnnnnnnnnnnnnnnnnnnnnnnnnnnnnnnnnnnnnnnnnnnnnnnnnnnnnnnnnnnnnnnnnnnnnnnnnnnnnnnnnnnnnnnnnnnnnnnnnnnnnnnnnnnnnnnnnnnnnnnnnnnnnnnnnnnnnnnnnnnnnnnnnnnnnnnnnnnnnnnnnnnnnnnnnnnnnnnnnnnnnnnnnnnnnnnnnnnnnnnnnnnnnnnnnnnnnnnnnnnnnnnnnnnnnnnnnnnnnnnnnnnnnnnnnnnnnnnnnnnnnnnnnnnnnnnnnnnnnnnnnnnnnnnnnnnnnnnnnnnnnnnnnnnnnnnnnnnnnnnnnnnnnnnnnnnnnnnnnnnnnnnnnnnnnnnnnnnnnnnnnnnnnnnnnnnnnnnnnnnnnnnnnnnnnnnnnnnnnnnnnnnnnnnnnnnnnnnnnnnnnnnnnnnnnnnnnnnnnnnnnnnnnnnnnnnnnnnnnnnnnnnnnnnnnnnnnnnnnnnnnnnnnnnnnnnnnnnnnnnnnnnnnnnnnnnnnnnnnnnnnnnnnnnnnnnnnnnnnnnnnnnnnnnnnnnnnnnnnnnnnnnnnnnnnnnnnnnnnnnnnnnnnnnnnnnnnnnnnnnnnnnnnnnnnnnnnnnnnnnnnnnnnnnnnnnnnnnnnnnnnnnnnnnnnnnnnnnnnnnnnnnnnnnnnnnnnnnnnnnnnnnnnnnnnnnnnnnnnnnnnnnnnnnnnnnnnnnnnnnnnnnnnnnnnnnnnnnnnnnnnnnnnnnnnnnnnnnnnnnnnnnnnnnnnnnnnnnnnnnnnnnnnnnnnnnnnnnnnnnnnnnnnnnnnnnnnnnnnnnnnnnnnnnnnnnnnnnnnnnnnnnnnnnnnnnnnnnnnnnnnnnnnnnnnnnnnnnnnnnnnnnnnnnnnnnnnnnnnnnnnnnnnnnnnnnnnnnnnnnnnnnnnnnnnnnnnnnnnnnnnnnnnnnnnnnnnnnnnnnnnnnnnnnnnnnnnnnnnnnnnnnnnnnnnnnnnnnnnnnnnnnnnnnnnnnnnnnnnnnnnnnnnnnnnnnnnnnnnnnnnnnnnnnnnnnnnnnnnnnnnnnnnnnnnnnnnnnnnnnnnnnnnnnnnnnnnnnnnnnnnnnnnnnnnnnnnnnnnnnnnnnnnnnnnnnnnnnnnnnnnnnnnnnnnnnnnnnnnnnnnnnnnnnnnnnnnnnnnnnnnnnnnnnnnnnnnnnnnnnnnnnnnnnnnnnnnnnnnnnnnnnnnnnnnnnnnnnnnnnnnnnnnnnnnnnnnnnnnnnnnnnnnnnnnnnnnnnnnnnnnnnnnnnnnnnnnnnnnnnnnnnnnnnnnnnnnnnnnnnnnnnnnnnnnnnnnnnnnnnnnnnnnnnnnnnnnnnnnnnnnnnnnnnnnnnnnnnnnnnnnnnnnnnnnnnnnnnnnnnnnnnnnnnnnnnnnnnnnnnnnnnnnnnnnnnnnnnnnnnnnnnnnnnnnnnnnnnnnnnnnnnnnnnnnnnnnnnnnnnnnnnnnnnnnnnnnnnnnnnnnnnnnnnnnnnnnnnnnnnnnnnnnnnnnnnnnnnnnnnnnnnnnnnnnnnnnnnnnnnnnnnnnnnnnnnnnnnnnnnnnnnnnnnnnnnnnnnnnnnnnnnnnnnnnnnnnnnnnnnnnnnnnnnnnnnnnnnnnnnnnnnnnnnnnnnnnnnnnnnnnnnnnnnnnnnnnnnnnnnnnnnnnnnnnnnnnnnnnnnnnnnnnnnnnnnnnnnnnnnnnnnnnnnnnnnnnnnnnnnnnnnnnnnnnnnnnnnnnnnnnnnnnnnnnnnnnnnnnnnnnnnnnnnnnnnnnnnnnnnnnnnnnnnnnnnnnnnnnnnnnnnnnnnnnnnnnnnnnnnnnnnnnnnnnnnnnnnnnnnnnnnnnnnnnnnnnnnnnnnnnnnnnnnnnnnnnnnnnnnnnnnnnnnnnnnnnnnnnnnnnnnnnnnnnnnnnnnnnnnnnnnnnnnnnnnnnnnnnnnnnnnnnnnnnnnnnnnnnnnnnnnnnnnnnnnnnnnnnnnnnnnnnnnnnnnnnnnnnnnnnnnnnnnnnnnnnnnnnnnnnnnnnnnnnnnnnnnnnnnnnnnnnnnnnnnnnnnnnnnnnnnnnnnnnnnnnnnnnnnnnnnnnnnnnnnnnnnnnnnnnnnnnnnnnnnnnnnnnnnnnnnnnnnnnnnnnnnnnnnnnnnnnnnnnnnnnnnnnnnnnnnnnnnnnnnnnnnnnnnnnnnnnnnnnnnnnnnnnnnnnnnnnnnnnnnnnnnnnnnnnnnnnnnnnnnnnnnnnnnnnnnnnnnnnnnnnnnnnnnnnnnnnnnnnnnnnnnnnnnnnnnnnnnnnnnnnnnnnnnnnnnnnnnnnnnnnnnnnnnnnnnnnnnnnnnnnnnnnnnnnnnnnnnnnnnnnnnnnnnnnnnnnnnnnnnnnnnnnnnnnnnnnnnnnnnnnnnnnnnnnnnnnnnnnnnnnnnnnnnnnnnnnnnnnnnnnnnnnnnnnnnnnnnnnnnnnnnnnnnnnnnnnnnnnnnnnnnnnnnnnnnnnnnnnnnnnnnnnnnnnnnnnnnnnnnnnnnnnnnnnnnnnnnnnnnnnnnnnnnnnnnnnnnnnnnnnnnnnnnnnnnnnnnnnnnnnnnnnnnnnnnnnnnnnnnnnnnnnnnnnnnnnnnnnnnnnnnnnnnnnnnnnnnnnnnnnnnnnnnnnnnnnnnnnnnnnnnnnnnnnnnnnnnnnnnnnnnnnnnnnnnnnnnnnnnnnnnnnnnnnnnnnnnnnnnnnnnnnnnnnnnnnnnnnnnnnnnnnnnnnnnnnnnnnnnnnnnnnnnnnnnnnnnnnnnnnnnnnnnnnnnnnnnnnnnnnnnnnnnnnnnnnnnnnnnnnnnnnnnnnnnnnnnnnnnnnnnnnnnnnnnnnnnnnnnnnnnnnnnnnnnnnnnnnnnnnnnnnnnnnnnnnnnnnnnnnnnnnnnnnnnnnnnnnnnnnnnnnnnnnnnnnnnnnnnnnnnnnnnnnnnnnnnnnnnnnnnnnnnnnnnnnnnnnnnnnnnnnnnnnnnnnnnnnnnnnnnnnnnnnnnnnnnnnnnnnnnnnnnnnnnnnnnnnnnnnnnnnnnnnnnnnnnnnnnnnnnnnnnnnnnnnnnnnnnnnnnnnnnnnnnnnnnnnnnnnnnnnnnnnnnnnnnnnnnnnnnnnnnnnnnnnnnnnnnnnnnnnnnnnnnnnnnnnnnnnnnnnnnnnnnnnnnnnnnnnnnnnnnnnnnnnnnnnnnnnnnnnnnnnnnnnnnnnnnnnnnnnnnnnnnnnnnnnnnnnnnnnnnnnnnnnnnnnnnnnnnnnnnnnnnnnnnnnnnnnnnnnnnnnnnnnnnnnnnnnnnnnnnnnnnnnnnnnnnnnnnnnnnnnnnnnnnnnnnnnnnnnnnnnnnnnnnnnnnnnnnnnnnnnnnnnnnnnnnnnnnnnnnnnnnnnnnnnnnnnnnnnnnnnnnnnnnnnnnnnnnnnnnnnnnnnnnnnnnnnnnnnnnnnnnnnnnnnnnnnnnnnnnnnnnnnnnnnnnnnnnnnnnnnnnnnnnnnnnnnnnnnnnnnnnnnnnnnnnnnnnnnnnnnnnnnnnnnnnnnnnnnnnnnnnnnnnnnnnnnnnnnnnnnnnnnnnnnnnnnnnnnnnnnnnnnnnnnnnnnnnnnnnnnnnnnnnnnnnnnnnnnnnnnnnnnnnnnnnnnnnnnnnnnnnnnnnnnnnnnnnnnnnnnnnnnnnnnnnnnnnnnnnnnnnnnnnnnnnnnnnnnnnnnnnnnnnnnnnnnnnnnnnnnnnnnnnnnnnnnnnnnnnnnnnnnnnnnnnnnnnnnnnnnnnnnnnnnnnnnnnnnnnnnnnnnnnnnnnnnnnnnnnnnnnnnnnnnnnnnnnnnnnnnnnnnnnnnnnnnnnnnnnnnnnnnnnnnnnnnnnnnnnnnnnnnnnnnnnnnnnnnnnnnnnnnnnnnnnnnnnnnnnnnnnnnnnnnnnnnnnnnnnnnnnnnnnnnnnnnnnnnnnnnnnnnnnnnnnnnnnnnnnnnnnnnnnnnnnnnnnnnnnnnnnnnnnnnnnnnnnnnnnnnnnnnnnnnnnnnnnnnnnnnnnnnnnnnnnnnnnnnnnnnnnnnnnnnnnnnnnnnnnnnnnnnnnnnnnnnnnnnnnnnnnnnnnnnnnnnnnnnnnnnnnnnnnnnnnnnnnnnnnnnnnnnnnnnnnnnnnnnnnnnnnnnnnnnnnnnnnnnnnnnnnnnnnnnnnnnnnnnnnnnnnnnnnnnnnnnnnnnnnnnnnnnnnnnnnnnnnnnnnnnnnnnnnnnnnnnnnnnnnnnnnnnnnnnnnnnnnnnnnnnnnnnnnnnnnnnnnnnnnnnnnnnnnnnnnnnnnnnnnnnnnnnnnnnnnnnnnnnnnnnnnnnnnnnnnnnnnnnnnnnnnnnnnnnnnnnnnnnnnnnnnnnnnnnnnnnnnnnnnnnnnnnnnnnnnnnnnnnnnnnnnnnnnnnnnnnnnnnnnnnnnnnnnnnnnnnnnnnnnnnnnnnnnnnnnnnnnnnnnnnnnnnnnnnnnnnnnnnnnnnnnnnnnnnnnnnnnnnnnnnnnnnnnnnnnnnnnnnnnnnnnnnnnnnnnnnnnnnnnnnnnnnnnnnnnnnnnnnnnnnnnnnnnnnnnnnnnnnnnnnnnnnnnnnnnnnnnnnnnnnnnnnnnnnnnnnnnnnnnnnnnnnnnnnnnnnnnnnnnnnnnnnnnnnnnnnnnnnnnnnnnnnnnnnnnnnnnnnnnnnnnnnnnnnnnnnnnnnnnnnnnnnnnnnnnnnnnnnnnnnnnnnnnnnnnnnnnnnnnnnnnnnnnnnnnnnnnnnnnnnnnnnnnnnnnnnnnnnnnnnnnnnnnnnnnnnnnnnnnnnnnnnnnnnnnnnnnnnnnnnnnnnnnnnnnnnnnnnnnnnnnnnnnnnnnnnnnnnnnnnnnnnnnnnnnnnnnnnnnnnnnnnnnnnnnnnnnnnnnnnnnnnnnnnnnnnnnnnnnnnnnnnnnnnnnnnnnnnnnnnnnnnnnnnnnnnnnnnnnnnnnnnnnnnnnnnnnnnnnnnnnnnnnnnnnnnnnnnnnnnnnnnnnnnnnnnnnnnnnnnnnnnnnnnnnnnnnnnnnnnnnnnnnnnnnnnnnnnnnnnnnnnnnnnnnnnnnnnnnnnnnnnnnnnnnnnnnnnnnnnnnnnnnnnnnnnnnnnnnnnnnnnnnnnnnnnnnnnnnnnnnnnnnnnnnnnnnnnnnnnnnnnnnnnnnnnnnnnnnnnnnnnnnnnnnnnnnnnnnnnnnnnnnnnnnnnnnnnnnnnnnnnnnnnnnnnnnnnnnnnnnnnnnnnnnnnnnnnnnnnnnnnnnnnnnnnnnnnnnnnnnnnnnnnnnnnnnnnnnnnnnnnnnnnnnnnnnnnnnnnnnnnnnnnnnnnnnnnnnnnnnnnnnnnnnnnnnnnnnnnnnnnnnnnnnnnnnnnnnnnnnnnnnnnnnnnnnnnnnnnnnnnnnnnnnnnnnnnnnnnnnnnnnnnnnnnnnnnnnnnnnnnnnnnnnnnnnnnnnnnnnnnnnnnnnnnnnnnnnnnnnnnnnnnnnnnnnnnnnnnnnnnnnnnnnnnnnnnnnnnnnnnnnnnnnnnnnnnnnnnnnnnnnnnnnnnnnnnnnnnnnnnnnnnnnnnnnnnnnnnnnnnnnnnnnnnnnnnnnnnnnnnnnnnnnnnnnnnnnnnnnnnnnnnnnnnnnnnnnnnnnnnnnnnnnnnnnnnnnnnnnnnnnnnnnnnnnnnnnnnnnnnnnnnnnnnnnnnnnnnnnnnnnnnnnnnnnnnnnnnnnnnnnnnnnnnnnnnnnnnnnnnnnnnnnnnnnnnnnnnnnnnnnnnnnnnnnnnnnnnnnnnnnnnnnnnnnnnnnnnnnnnnnnnnnnnnnnnnnnnnnnnnnnnnnnnnnnnnnnnnnnnnnnnnnnnnnnnnnnnnnnnnnnnnnnnnnnnnnnnnnnnnnnnnnnnnnnnnnnnnnnnnnnnnnnnnnnnnnnnnnnnnnnnnnnnnnnnnnnnnnnnnnnnnnnnnnnnnnnnnnnnnnnnnnnnnnnnnnnnnnnnnnnnnnnnnnnnnnnnnnnnnnnnnnnnnnnnnnnnnnnnnnnnnnnnnnnnnnnnnnnnnnnnnnnnnnnnnnnnnnnnnnnnnnnnnnnnnnnnnnnnnnnnnnnnnnnnnnnnnnnnnnnnnnnnnnnnnnnnnnnnnnnnnnnnnnnnnnnnnnnnnnnnnnnnnnnnnnnnnnnnnnnnnnnnnnnnnnnnnnnnnnnnnnnnnnnnnnnnnnnnnnnnnnnnnnnnnnnnnnnnnnnnnnnnnnnnnnnnnnnnnnnnnnnnnnnnnnnnnnnnnnnnnnnnnnnnnnnnnnnnnnnnnnnnnnnnnnnnnnnnnnnnnnnnnnnnnnnnnnnnnnnnnnnnnnnnnnnnnnnnnnnnnnnnnnnnnnnnnnnnnnnnnnnnnnnnnnnnnnnnnnnnnnnnnnnnnnnnnnnnnnnnnnnnnnnnnnnnnnnnnnnnnnnnnnnnnnnnnnnnnnnnnnnnnnnnnnnnnnnnnnnnnnnnnnnnnnnnnnnnnnnnnnnnnnnnnnnnnnnnnnnnnnnnnnnnnnnnnnnnnnnnnnnnnnnnnnnnnnnnnnnnnnnnnnnnnnnnnnnnnnnnnnnnnnnnnnnnnnnnnnnnnnnnnnnnnnnnnnnnnnnnnnnnnnnnnnnnnnnnnnnnnnnnnnnnnnnnnnnnnnnnnnnnnnnnnnnnnnnnnnnnnnnnnnnnnnnnnnnnnnnnnnnnnnnnnnnnnnnnnnnnnnnnnnnnnnnnnnnnnnnnnnnnnnnnnnnnnnnnnnnnnnnnnnnnnnnnnnnnnnnnnnnnnnnnnnnnnnnnnnnnnnnnnnnnnnnnnnnnnnnnnnnnnnnnnnnnnnnnnnnnnnnnnnnnnnnnnnnnnnnnnnnnnnnnnnnnnnnnnnnnnnnnnnnnnnnnnnnnnnnnnnnnnnnnnnnnnnnnnnnnnnnnnnnnnnnnnnnnnnnnnnnnnnnnnnnnnnnnnnnnnnnnnnnnnnnnnnnnnnnnnnnnnnnnnnnnnnnnnnnnnnnnnnnnnnnnnnnnnnnnnnnnnnnnnnnnnnnnnnnnnnnnnnnnnnnnnnnnnnnnnnnnnnnnnnnnnnnnnnnnnnnnnnnnnnnnnnnnnnnnnnnnnnnnnnnnnnnnnnnnnnnnnnnnnnnnnnnnnnnnnnnnnnnnnnnnnnnnnnnnnnnnnnnnnnnnnnnnnnnnnnnnnnnnnnnnnnnnnnnnnnnnnnnnnnnnnnnnnnnnnnnnnnnnnnnnnnnnnnnnnnnnnnnnnnnnnnnnnnnnnnnnnnnnnnnnnnnnnnnnnnnnnnnnnnnnnnnnnnnnnnnnnnnnnnnnnnnnnnnnnnnnnnnnnnnnnnnnnnnnnnnnnnnnnnnnnnnnnnnnnnnnnnnnnnnnnnnnnnnnnnnnnnnnnnnnnnnnnnnnnnnnnnnnnnnnnnnnnnnnnnnnnnnnnnnnnnnnnnnnnnnnnnnnnnnnnnnnnnnnnnnnnnnnnnnnnnnnnnnnnnnnnnnnnnnnnnnnnnnnnnnnnnnnnnnnnnnnnnnnnnnnnnnnnnnnnnnnnnnnnnnnnnnnnnnnnnnnnnnnnnnnnnnnnnnnnnnnnnnnnnnnnnnnnnnnnnnnnnnnnnnnnnnnnnnnnnnnnnnnnnnnnnnnnnnnnnnnnnnnnnnnnnnnnnnnnnnnnnnnnnnnnnnnnnnnnnnnnnnnnnnnnnnnnnnnnnnnnnnnnnnnnnnnnnnnnnnnnnnnnnnnnnnnnnnnnnnnnnnnnnnnnnnnnnnnnnnnnnnnnnnnnnnnnnnnnnnnnnnnnnnnnnnnnnnnnnnnnnnnnnnnnnnnnnnnnnnnnnnnnnnnnnnnnnnnnnnnnnnnnnnnnnnnnnnnnnnnnnnnnnnnnnnnnnnnnnnnnnnnnnnnnnnnnnnnnnnnnnnnnnnnnnnnnnnnnnnnnnnnnnnnnnnnnnnnnnnnnnnnnnnnnnnnnnnnnnnnnnnnnnnnnnnnnnnnnnnnnnnnnnnnnnnnnnnnnnnnnnnnnnnnnnnnnnnnnnnnnnnnnnnnnnnnnnnnnnnnnnnnnnnnnnnnnnnnnnnnnnnnnnnnnnnnnnnnnnnnnnnnnnnnnnnnnnnnnnnnnnnnnnnnnnnnnnnnnnnnnnnnnnnnnnnnnnnnnnnnnnnnnnnnnnnnnnnnnnnnnnnnnnnnnnnnnnnnnnnnnnnnnnnnnnnnnnnnnnnnnnnnnnnnnnnnnnnnnnnnnnnnnnnnnnnnnnnnnnnnnnnnnnnnnnnnnnnnnnnnnnnnnnnnnnnnnnnnnnnnnnnnnnnnnnnnnnnnnnnnnnnnnnnnnnnnnnnnnnnnnnnnnnnnnnnnnnnnnnnnnnnnnnnnnnnnnnnnnnnnnnnnnnnnnnnnnnnnnnnnnnnnnnnnnnnnnnnnnnnnnnnnnnnnnnnnnnnnnnnnnnnnnnnnnnnnnnnnnnnnnnnnnnnnnnnnnnnnnnnnnnnnnnnnnnnnnnnnnnnnnnnnnnnnnnnnnnnnnnnnnnnnnnnnnnnnnnnnnnnnnnnnnnnnnnnnnnnnnnnnnnnnnnnnnnnnnnnnnnnnnnnnnnnnnnnnnnnnnnnnnnnnnnnnnnnnnnnnnnnnnnnnnnnnnnnnnnnnnnnnnnnnnnnnnnnnnnnnnnnnnnnnnnnnnnnnnnnnnnnnnnnnnnnnnnnnnnnnnnnnnnnnnnnnnnnnnnnnnnnnnnnnnnnnnnnnnnnnnnnnnnnnnnnnnnnnnnnnnnnnnnnnnnnnnnnnnnnnnnnnnnnnnnnnnnnnnnnnnnnnnnnnnnnnnnnnnnnnnnnnnnnnnnnnnnnnnnnnnnnnnnnnnnnnnnnnnnnnnnnnnnnnnnnnnnnnnnnnnnnnnnnnnnnnnnnnnnnnnnnnnnnnnnnnnnnnnnnnnnnnnnnnnnnnnnnnnnnnnnnnnnnnnnnnnnnnnnnnnnnnnnnnnnnnnnnnnnnnnnnnnnnnnnnnnnnnnnnnnnnnnnnnnnnnnnnnnnnnnnnnnnnnnnnnnnnnnnnnnnnnnnnnnnnnnnnnnnnnnnnnnnnnnnnnnnnnnnnnnnnnnnnnnnnnnnnnnnnnnnnnnnnnnnnnnnnnnnnnnnnnnnnnnnnnnnnnnnnnnnnnnnnnnnnnnnnnnnnnnnnnnnnnnnnnnnnnnnnnnnnnnnnnnnnnnnnnnnnnnnnnnnnnnnnnnnnnnnnnnnnnnnnnnnnnnnnnnnnnnnnnnnnnnnnnnnnnnnnnnnnnnnnnnnnnnnnnnnnnnnnnnnnnnnnnnnnnnnnnnnnnnnnnnnnnnnnnnnnnnnnnnnnnnnnnnnnnnnnnnnnnnnnnnnnnnnnnnnnnnnnnnnnnnnnnnnnnnnnnnnnnnnnnnnnnnnnnnnnnnnnnnnnnnnnnnnnnnnnnnnnnnnnnnnnnnnnnnnnnnnnnnnnnnnnnnnnnnnnnnnnnnnnnnnnnnnnnnnnnnnnnnnnnnnnnnnnnnnnnnnnnnnnnnnnnnnnnnnnnnnnnnnnnnnnnnnnnnnnnnnnnnnnnnnnnnnnnnnnnnnnnnnnnnnnnnnnnnnnnnnnnnnnnnnnnnnnnnnnnnnnnnnnnnnnnnnnnnnnnnnnnnnnnnnnnnnnnnnnnnnnnnnnnnnnnnnnnnnnnnnnnnnnnnnnnnnnnnnnnnnnnnnnnnnnnnnnnnnnnnnnnnnnnnnnnnnnnnnnnnnnnnnnnnnnnnnnnnnnnnnnnnnnnnnnnnnnnnnnnnnnnnnnnnnnnnnnnnnnnnnnnnnnnnnnnnnnnnnnnnnnnnnnnnnnnnnnnnnnnnnnnnnnnnnnnnnnnnnnnnnnnnnnnnnnnnnnnnnnnnnnnnnnnnnnnnnnnnnnnnnnnnnnnnnnnnnnnnnnnnnnnnnnnnnnnnnnnnnnnnnnnnnnnnnnnnnnnnnnnnnnnnnnnnnnnnnnnnnnnnnnnnnnnnnnnnnnnnnnnnnnnnnnnnnnnnnnnnnnnnnnnnnnnnnnnnnnnnnnnnnnnnnnnnnnnnnnnnnnnnnnnnnnnnnnnnnnnnnnnnnnnnnnnnnnnnnnnnnnnnnnnnnnnnnnnnnnnnnnnnnnnnnnnnnnnnnnnnnnnnnnnnnnnnnnnnnnnnnnnnnnnnnnnnnnnnnnnnnnnnnnnnnnnnnnnnnnnnnnnnnnnnnnnnnnnnnnnnnnnnnnnnnnnnnnnnnnnnnnnnnnnnnnnnnnnnnnnnnnnnnnnnnnnnnnnnnnnnnnnnnnnnnnnnnnnnnnnnnnnnnnnnnnnnnnnnnnnnnnnnnnnnnnnnnnnnnnnnnnnnnnnnnnnnnnnnnnnnnnnnnnnnnnnnnnnnnnnnnnnnnnnnnnnnnnnnnnnnnnnnnnnnnnnnnnnnnnnnnnnnnnnnnnnnnnnnnnnnnnnnnnnnnnnnnnnnnnnnnnnnnnnnnnnnnnnnnnnnnnnnnnnnnnnnnnnnnnnnnnnnnnnnnnnnnnnnnnnnnnnnnnnnnnnnnnnnnnnnnnnnnnnnnnnnnnnnnnnnnnnnnnnnnnnnnnnnnnnnnnnnnnnnnnnnnnnnnnnnnnnnnnnnnnnnnnnnnnnnnnnnnnnnnnnnnnnnnnnnnnnnnnnnnnnnnnnnnnnnnnnnnnnnnnnnnnnnnnnnnnnnnnnnnnnnnnnnnnnnnnnnnnnnnnnnnnnnnnnnnnnnnnnnnnnnnnnnnnnnnnnnnnnnnnnnnnnnnnnnnnnnnnnnnnnnnnnnnnnnnnnnnnnnnnnnnnnnnnnnnnnnnnnnnnnnnnnnnnnnnnnnnnnnnnnnnnnnnnnnnnnnnnnnnnnnnnnnnnnnnnnnnnnnnnnnnnnnnnnnnnnnnnnnnnnnnnnnnnnnnnnnnnnnnnnnnnnnnnnnnnnnnnnnnnnnnnnnnnnnnnnnnnnnnnnnnnnnnnnnnnnnnnnnnnnnnnnnnnnnnnnnnnnnnnnnnnnnnnnnnnnnnnnnnnnnnnnnnnnnnnnnnnnnnnnnnnnnnnnnnnnnnnnnnnnnnnnnnnnnnnnnnnnnnnnnnnnnnnnnnnnnnnnnnnnnnnnnnnnnnnnnnnnnnnnnnnnnnnnnnnnnnnnnnnnnnnnnnnnnnnnnnnnnnnnnnnnnnnnnnnnnnnnnnnnnnnnnnnnnnnnnnnnnnnnnnnnnnnnnnnnnnnnnnnnnnnnnnnnnnnnnnnnnnnnnnnnnnnnnnnnnnnnnnnnnnnnnnnnnnnnnnnnnnnnnnnnnnnnnnnnnnnnnnnnnnnnnnnnnnnnnnnnnnnnnnnnnnnnnnnnnnnnnnnnnnnnnnnnnnnnnnnnnnnnnnnnnnnnnnnnnnnnnnnnnnnnnnnnnnnnnnnnnnnnnnnnnnnnnnnnnnnnnnnnnnnnnnnnnnnnnnnnnnnnnnnnnnnnnnnnnnnnnnnnnnnnnnnnnnnnnnnnnnnnnnnnnnnnnnnnnnnnnnnnnnnnnnnnnnnnnnnnnnnnnnnnnnnnnnnnnnnnnnnnnnnnnnnnnnnnnnnnnnnnnnnnnnnnnnnnnnnnnnnnnnnnnnnnnnnnnnnnnnnnnnnnnnnnnnnnnnnnnnnnnnnnnnnnnnnnnnnnnnnnnnnnnnnnnnnnnnnnnnnnnnnnnnnnnnnnnnnnnnnnnnnnnnnnnnnnnnnnnnnnnnnnnnnnnnnnnnnnnnnnnnnnnnnnnnnnnnnnnnnnnnnnnnnnnnnnnnnnnnnnnnnnnnnnnnnnnnnnnnnnnnnnnnnnnnnnnnnnnnnnnnnnnnnnnnnnnnnnnnnnnnnnnnnnnnnnnnnnnnnnnnnnnnnnnnnnnnnnnnnnnnnnnnnnnnnnnnnnnnnnnnnnnnnnnnnnnnnnnnnnnnnnnnnnnnnnnnnnnnnnnnnnnnnnnnnnnnnnnnnnnnnnnnnnnnnnnnnnnnnnnnnnnnnnnnnnnnnnnnnnnnnnnnnnnnnnnnnnnnnnnnnnnnnnnnnnnnnnnnnnnnnnnnnnnnnnnnnnnnnnnnnnnnnnnnnnnnnnnnnnnnnnnnnnnnnnnnnnnnnnnnnnnnnnnnnnnnnnnnnnnnnnnnnnnnnnnnnnnnnnnnnnnnnnnnnnnnnnnnnnnnnnnnnnnnnnnnnnnnnnnnnnnnnnnnnnnnnnnnnnnnnnnnnnnnnnnnnnnnnnnnnnnnnnnnnnnnnnnnnnnnnnnnnnnnnnnnnnnnnnnnnnnnnnnnnnnnnnnnnnnnnnnnnnnnnnnnnnnnnnnnnnnnnnnnnnnnnnnnnnnnnnnnnnnnnnnnnnnnnnnnnnnnnnnnnnnnnnnnnnnnnnnnnnnnnnnnnnnnnnnnnnnnnnnnnnnnnnnnnnnnnnnnnnnnnnnnnnnnnnnnnnnnnnnnnnnnnnnnnnnnnnnnnnnnnnnnnnnnnnnnnnnnnnnnnnnnnnnnnnnnnnnnnnnnnnnnnnnnnnnnnnnnnnnnnnnnnnnnnnnnnnnnnnnnnnnnnnnnnnnnnnnnnnnnnnnnnnnnnnnnnnnnnnnnnnnnnnnnnnnnnnnnnnnnnnnnnnnnnnnnnnnnnnnnnnnnnnnnnnnnnnnnnnnnnnnnnnnnnnnnnnnnnnnnnnnnnnnnnnnnnnnnnnnnnnnnnnnnnnnnnnnnnnnnnnnnnnnnnnnnnnnnnnnnnnnnnnnnnnnnnnnnnnnnnnnnnnnnnnnnnnnnnnnnnnnnnnnnnnnnnnnnnnnnnnnnnnnnnnnnnnnnnnnnnnnnnnnnnnnnnnnnnnnnnnnnnnnnnnnnnnnnnnnnnnnnnnnnnnnnnnnnnnnnnnnnnnnnnnnnnnnnnnnnnnnnnnnnnnnnnnnnnnnnnnnnnnnnnnnnnnnnnnnnnnnnnnnnnnnnnnnnnnnnnnnnnnnnnnnnnnnnnnnnnnnnnnnnnnnnnnnnnnnnnnnnnnnnnnnnnnnnnnnnnnnnnnnnnnnnnnnnnnnnnnnnnnnnnnnnnnnnnnnnnnnnnnnnnnnnnnnnnnnnnnnnnnnnnnnnnnnnnnnnnnnnnnnnnnnnnnnnnnnnnnnnnnnnnnnnnnnnnnnnnnnnnnnnnnnnnnnnnnnnnnnnnnnnnnnnnnnnnnnnnnnnnnnnnnnnnnnnnnnnnnnnnnnnnnnnnnnnnnnnnnnnnnnnnnnnnnnnnnnnnnnnnnnnnnnnnnnnnnnnnnnnnnnnnnnnnnnnnnnnnnnnnnnnnnnnnnnnnnnnnnnnnnnnnnnnnnnnnnnnnnnnnnnnnnnnnnnnnnnnnnnnnnnnnnnnnnnnnnnnnnnnnnnnnnnnnnnnnnnnnnnnnnnnnnnnnnnnnnnnnnnnnnnnnnnnnnnnnnnnnnnnnnnnnnnnnnnnnnnnnnnnnnnnnnnnnnnnnnnnnnnnnnnnnnnnnnnnnnnnnnnnnnnnnnnnnnnnnnnnnnnnnnnnnnnnnnnnnnnnnnnnnnnnnnnnnnnnnnnnnnnnnnnnnnnnnnnnnnnnnnnnnnnnnnnnnnnnnnnnnnnnnnnnnnnnnnnnnnnnnnnnnnnnnnnnnnnnnnnnnnnnnnnnnnnnnnnnnnnnnnnnnnnnnnnnnnnnnnnnnnnnnnnnnnnnnnnnnnnnnnnnnnnnnnnnnnnnnnnnnnnnnnnnnnnnnnnnnnnnnnnnnnnnnnnnnnnnnnnnnnnnnnnnnnnnnnnnnnnnnnnnnnnnnnnnnnnnnnnnnnnnnnnnnnnnnnnnnnnnnnnnnnnnnnnnnnnnnnnnnnnnnnnnnnnnnnnnnnnnnnnnnnnnnnnnnnnnnnnnnnnnnnnnnnnnnnnnnnnnnnnnnnnnnnnnnnnnnnnnnnnnnnnnnnnnnnnnnnnnnnnnnnnnnnnnnnnnnnnnnnnnnnnnnnnnnnnnnnnnnnnnnnnnnnnnnnnnnnnnnnnnnnnnnnnnnnnnnnnnnnnnnnnnnnnnnnnnnnnnnnnnnnnnnnnnnnnnnnnnnnnnnnnnnnnnnnnnnnnnnnnnnnnnnnnnnnnnnnnnnnnnnnnnnnnnnnnnnnnnnnnnnnnnnnnnnnnnnnnnnnnnnnnnnnnnnnnnnnnnnnnnnnnnnnnnnnnnnnnnnnnnnnnnnnnnnnnnnnnnnnnnnnnnnnnnnnnnnnnnnnnnnnnnnnnnnnnnnnnnnnnnnnnnnnnnnnnnnnnnnnnnnnnnnnnnnnnnnnnnnnnnnnnnnnnnnnnnnnnnnnnnnnnnnnnnnnnnnnnnnnnnnnnnnnnnnnnnnnnnnnnnnnnnnnnnnnnnnnnnnnnnnnnnnnnnnnnnnnnnnnnnnnnnnnnnnnnnnnnnnnnnnnnnnnnnnnnnnnnnnnnnnnnnnnnnnnnnnnnnnnnnnnnnnnnnnnnnnnnnnnnnnnnnnnnnnnnnnnnnnnnnnnnnnnnnnnnnnnnnnnnnnnnnnnnnnnnnnnnnnnnnnnnnnnnnnnnnnnnnnnnnnnnnnnnnnnnnnnnnnnnnnnnnnnnnnnnnnnnnnnnnnnnnnnnnnnnnnnnnnnnnnnnnnnnnnnnnnnnnnnnnnnnnnnnnnnnnnnnnnnnnnnnnnnnnnnnnnnnnnnnnnnnnnnnnnnnnnnnnnnnnnnnnnnnnnnnnnnnnnnnnnnnnnnnnnnnnnnnnnnnnnnnnnnnnnnnnnnnnnnnnnnnnnnnnnnnnnnnnnnnnnnnnnnnnnnnnnnnnnnnnnnnnnnnnnnnnnnnnnnnnnnnnnnnnnnnnnnnnnnnnnnnnnnnnnnnnnnnnnnnnnnnnnnnnnnnnnnnnnnnnnnnnnnnnnnnnnnnnnnnnnnnnnnnnnnnnnnnnnnnnnnnnnnnnnnnnnnnnnnnnnnnnnnnnnnnnnnnnnnnnnnnnnnnnnnnnnnnnnnnnnnnnnnnnnnnnnnnnnnnnnnnnnnnnnnnnnnnnnnnnnnnnnnnnnnnnnnnnnnnnnnnnnnnnnnnnnnnnnnnnnnnnnnnnnnnnnnnnnnnnnnnnnnnnnnnnnnnnnnnnnnnnnnnnnnnnnnnnnnnnnnnnnnnnnnnnnnnnnnnnnnnnnnnnnnnnnnnnnnnnnnnnnnnnnnnnnnnnnnnnnnnnnnnnnnnnnnnnnnnnnnnnnnnnnnnnnnnnnnnnnnnnnnnnnnnnnnnnnnnnnnnnnnnnnnnnnnnnnnnnnnnnnnnnnnnnnnnnnnnnnnnnnnnnnnnnnnnnnnnnnnnnnnnnnnnnnnnnnnnnnnnnnnnnnnnnnnnnnnnnnnnnnnnnnnnnnnnnnnnnnnnnnnnnnnnnnnnnnnnnnnnnnnnnnnnnnnnnnnnnnnnnnnnnnnnnnnnnnnnnnnnnnnnnnnnnnnnnnnnnnnnnnnnnnnnnnnnnnnnnnnnnnnnnnnnnnnnnnnnnnnnnnnnnnnnnnnnnnnnnnnnnnnnnnnnnnnnnnnnnnnnnnnnnnnnnnnnnnnnnnnnnnnnnnnnnnnnnnnnnnnnnnnnnnnnnnnnnnnnnnnnnnnnnnnnnnnnnnnnnnnnnnnnnnnnnnnnnnnnnnnnnnnnnnnnnnnnnnnnnnnnnnnnnnnnnnnnnnnnnnnnnnnnnnnnnnnnnnnnnnnnnnnnnnnnnnnnnnnnnnnnnnnnnnnnnnnnnnnnnnnnnnnnnnnnnnnnnnnnnnnnnnnnnnnnnnnnnnnnnnnnnnnnnnnnnnnnnnnnnnnnnnnnnnnnnnnnnnnnnnnnnnnnnnnnnnnnnnnnnnnnnnnnnnnnnnnnnnnnnnnnnnnnnnnnnnnnnnnnnnnnnnnnnnnnnnnnnnnnnnnnnnnnnnnnnnnnnnnnnnnnnnnnnnnnnnnnnnnnnnnnnnnnnnnnnnnnnnnnnnnnnnnnnnnnnnnnnnnnnnnnnnnnnnnnnnnnnnnnnnnnnnnnnnnnnnnnnnnnnnnnnnnnnnnnnnnnnnnnnnnnnnnnnnnnnnnnnnnnnnnnnnnnnnnnnnnnnnnnnnnnnnnnnnnnnnnnnnnnnnnnnnnnnnnnnnnnnnnnnnnnnnnnnnnnnnnnnnnnnnnnnnnnnnnnnnnnnnnnnnnnnnnnnnnnnnnnnnnnnnnnnnnnnnnnnnnnnnnnnnnnnnnnnnnnnnnnnnnnnnnnnnnnnnnnnnnnnnnnnnnnnnnnnnnnnnnnnnnnnnnnnnnnnnnnnnnnnnnnnnnnnnnnnnnnnnnnnnnnnnnnnnnnnnnnnnnnnnnnnnnnnnnnnnnnnnnnnnnnnnnnnnnnnnnnnnnnnnnnnnnnnnnnnnnnnnnnnnnnnnnnnnnnnnnnnnnnnnnnnnnnnnnnnnnnnnnnnnnnnnnnnnnnnnnnnnnnnnnnnnnnnnnnnnnnnnnnnnnnnnnnnnnnnnnnnnnnnnnnnnnnnnnnnnnnnnnnnnnnnnnnnnnnnnnnnnnnnnnnnnnnnnnnnnnnnnnnnnnnnnnnnnnnnnnnnnnnnnnnnnnnnnnnnnnnnnnnnnnnnnnnnnnnnnnnnnnnnnnnnnnnnnnnnnnnnnnnnnnnnnnnnnnnnnnnnnnnnnnnnnnnnnnnnnnnnnnnnnnnnnnnnnnnnnnnnnnnnnnnnnnnnnnnnnnnnnnnnnnnnnnnnnnnnnnnnnnnnnnnnnnnnnnnnnnnnnnnnnnnnnnnnnnnnnnnnnnnnnnnnnnnnnnnnnnnnnnnnnnnnnnnnnnnnnnnnnnnnnnnnnnnnnnnnnnnnnnnnnnnnnnnnnnnnnnnnnnnnnnnnnnnnnnnnnnnnnnnnnnnnnnnnnnnnnnnnnnnnnnnnnnnnnnnnnnnnnnnnnnnnnnnnnnnnnnnnnnnnnnnnnnnnnnnnnnnnnnnnnnnnnnnnnnnnnnnnnnnnnnnnnnnnnnnnnnnnnnnnnnnnnnnnnnnnnnnnnnnnnnnnnnnnnnnnnnnnnnnnnnnnnnnnnnnnnnnnnnnnnnnnnnnnnnnnnnnnnnnnnnnnnnnnnnnnnnnnnnnnnnnnnnnnnnnnnnnnnnnnnnnnnnnnnnnnnnnnnnnnnnnnnnnnnnnnnnnnnnnnnnnnnnnnnnnnnnnnnnnnnnnnnnnnnnnnnnnnnnnnnnnnnnnnnnnnnnnnnnnnnnnnnnnnnnnnnnnnnnnnnnnnnnnnnnnnnnnnnnnnnnnnnnnnnnnnnnnnnnnnnnnnnnnnnnnnnnnnnnnnnnnnnnnnnnnnnnnnnnnnnnnnnnnnnnnnnnnnnnnnnnnnnnnnnnnnnnnnnnnnnnnnnnnnnnnnnnnnnnnnnnnnnnnnnnnnnnnnnnnnnnnnnnnnnnnnnnnnnnnnnnnnnnnnnnnnnnnnnnnnnnnnnnnnnnnnnnnnnnnnnnnnnnnnnnnnnnnnnnnnnnnnnnnnnnnnnnnnnnnnnnnnnnnnnnnnnnnnnnnnnnnnnnnnnnnnnnnnnnnnnnnnnnnnnnnnnnnnnnnnnnnnnnnnnnnnnnnnnnnnnnnnnnnnnnnnnnnnnnnnnnnnnnnnnnnnnnnnnnnnnnnnnnnnnnnnnnnnnnnnnnnnnnnnnnnnnnnnnnnnnnnnnnnnnnnnnnnnnnnnnnnnnnnnnnnnnnnnnnnnnnnnnnnnnnnnnnnnnnnnnnnnnnnnnnnnnnnnnnnnnnnnnnnnnnnnnnnnnnnnnnnnnnnnnnnnnnnnnnnnnnnnnnnnnnnnnnnnnnnnnnnnnnnnnnnnnnnnnnnnnnnnnnnnnnnnnnnnnnnnnnnnnnnnnnnnnnnnnnnnnnnnnnnnnnnnnnnnnnnnnnnnnnnnnnnnnnnnnnnnnnnnnnnnnnnnnnnnnnnnnnnnnnnnnnnnnnnnnnnnnnnnnnnnnnnnnnnnnnnnnnnnnnnnnnnnnnnnnnnnnnnnnnnnnnnnnnnnnnnnnnnnnnnnnnnnnnnnnnnnnnnnnnnnnnnnnnnnnnnnnnnnnnnnnnnnnnnnnnnnnnnnnnnnnnnnnnnnnnnnnnnnnnnnnnnnnnnnnnnnnnnnnnnnnnnnnnnnnnnnnnnnnnnnnnnnnnnnnnnnnnnnnnnnnnnnnnnnnnnnnnnnnnnnnnnnnnnnnnnnnnnnnnnnnnnnnnnnnnnnnnnnnnnnnnnnnnnnnnnnnnnnnnnnnnnnnnnnnnnnnnnnnnnnnnnnnnnnnnnnnnnnnnnnnnnnnnnnnnnnnnnnnnnnnnnnnnnnnnnnnnnnnnnnnnnnnnnnnnnnnnnnnnnnnnnnnnnnnnnnnnnnnnnnnnnnnnnnnnnnnnnnnnnnnnnnnnnnnnnnnnnnnnnnnnnnnnnnnnnnnnnnnnnnnnnnnnnnnnnnnnnnnnnnnnnnnnnnnnnnnnnnnnnnnnnnnnnnnnnnnnnnnnnnnnnnnnnnnnnnnnnnnnnnnnnnnnnnnnnnnnnnnnnnnnnnnnnnnnnnnnnnnnnnnnnnnnnnnnnnnnnnnnnnnnnnnnnnnnnnnnnnnnnnnnnnnnnnnnnnnnnnnnnnnnnnnnnnnnnnnnnnnnnnnnnnnnnnnnnnnnnnnnnnnnnnnnnnnnnnnnnnnnnnnnnnnnnnnnnnnnnnnnnnnnnnnnnnnnnnnnnnnnnnnnnnnnnnnnnnnnnnnnnnnnnnnnnnnnnnnnnnnnnnnnnnnnnnnnnnnnnnnnnnnnnnnnnnnnnnnnnnnnnnnnnnnnnnnnnnnnnnnnnnnnnnnnnnnnnnnnnnnnnnnnnnnnnnnnnnnnnnnnnnnnnnnnnnnnnnnnnnnnnnnnnnnnnnnnnnnnnnnnnnnnnnnnnnnnnnnnnnnnnnnnnnnnnnnnnnnnnnnnnnnnnnnnnnnnnnnnnnnnnnnnnnnnnnnnnnnnnnnnnnnnnnnnnnnnnnnnnnnnnnnnnnnnnnnnnnnnnnnnnnnnnnnnnnnnnnnnnnnnnnnnnnnnnnnnnnnnnnnnnnnnnnnnnnnnnnnnnnnnnnnnnnnnnnnnnnnnnnnnnnnnnnnnnnnnnnnnnnnnnnnnnnnnnnnnnnnnnnnnnnnnnnnnnnnnnnnnnnnnnnnnnnnnnnnnnnnnnnnnnnnnnnnnnnnnnnnnnnnnnnnnnnnnnnnnnnnnnnnnnnnnnnnnnnnnnnnnnnnnnnnnnnnnnnnnnnnnnnnnnnnnnnnnnnnnnnnnnnnnnnnnnnnnnnnnnnnnnnnnnnnnnnnnnnnnnnnnnnnnnnnnnnnnnnnnnnnnnnnnnnnnnnnnnnnnnnnnnnnnnnnnnnnnnnnnnnnnnnnnnnnnnnnnnnnnnnnnnnnnnnnnnnnnnnnnnnnnnnnnnnnnnnnnnnnnnnnnnnnnnnnnnnnnnnnnnnnnnnnnnnnnnnnnnnnnnnnnnnnnnnnnnnnnnnnnnnnnnnnnnnnnnnnnnnnnnnnnnnnnnnnnnnnnnnnnnnnnnnnnnnnnnnnnnnnnnnnnnnnnnnnnnnnnnnnnnnnnnnnnnnnnnnnnnnnnnnnnnnnnnnnnnnnnnnnnnnnnnnnnnnnnnnnnnnnnnnnnnnnnnnnnnnnnnnnnnnnnnnnnnnnnnnnnnnnnnnnnnnnnnnnnnnnnnnnnnnnnnnnnnnnnnnnnnnnnnnnnnnnnnnnnnnnnnnnnnnnnnnnnnnnnnnnnnnnnnnnnnnnnnnnnnnnnnnnnnnnnnnnnnnnnnnnnnnnnnnnnnnnnnnnnnnnnnnnnnnnnnnnnnnnnnnnnnnnnnnnnnnnnnnnnnnnnnnnnnnnnnnnnnnnnnnnnnnnnnnnnnnnnnnnnnnnnnnnnnnnnnnnnnnnnnnnnnnnnnnnnnnnnnnnnnnnnnnnnnnnnnnnnnnnnnnnnnnnnnnnnnnnnnnnnnnnnnnnnnnnnnnnnnnnnnnnnnnnnnnnnnnnnnnnnnnnnnnnnnnnnnnnnnnnnnnnnnnnnnnnnnnnnnnnnnnnnnnnnnnnnnnnnnnnnnnnnnnnnnnnnnnnnnnnnnnnnnnnnnnnnnnnnnnnnnnnnnnnnnnnnnnnnnnnnnnnnnnnnnnnnnnnnnnnnnnnnnnnnnnnnnnnnnnnnnnnnnnnnnnnnnnnnnnnnnnnnnnnnnnnnnnnnnnnnnnnnnnnnnnnnnnnnnnnnnnnnnnnnnnnnnnnnnnnnnnnnnnnnnnnnnnnnnnnnnnnnnnnnnnnnnnnnnnnnnnnnnnnnnnnnnnnnnnnnnnnnnnnnnnnnnnnnnnnnnnnnnnnnnnnnnnnnnnnnnnnnnnnnnnnnnnnnnnnnnnnnnnnnnnnnnnnnnnnnnnnnnnnnnnnnnnnnnnnnnnnnnnnnnnnnnnnnnnnnnnnnnnnnnnnnnnnnnnnnnnnnnnnnnnnnnnnnnnnnnnnnnnnnnnnnnnnnnnnnnnnnnnnnnnnnnnnnnnnnnnnnnnnnnnnnnnnnnnnnnnnnnnnnnnnnnnnnnnnnnnnnnnnnnnnnnnnnnnnnnnnnnnnnnnnnnnnnnnnnnnnnnnnnnnnnnnnnnnnnnnnnnnnnnnnnnnnnnnnnnnnnnnnnnnnnnnnnnnnnnnnnnnnnnnnnnnnnnnnnnnnnnnnnnnnnnnnnnnnnnnnnnnnnnnnnnnnnnnnnnnnnnnnnnnnnnnnnnnnnnnnnnnnnnnnnnnnnnnnnnnnnnnnnnnnnnnnnnnnnnnnnnnnnnnnnnnnnnnnnnnnnnnnnnnnnnnnnnnnnnnnnnnnnnnnnnnnnnnnnnnnnnnnnnnnnnnnnnnnnnnnnnnnnnnnnnnnnnnnnnnnnnnnnnnnnnnnnnnnnnnnnnnnnnnnnnnnnnnnnnnnnnnnnnnnnnnnnnnnnnnnnnnnnnnnnnnnnnnnnnnnnnnnnnnnnnnnnnnnnnnnnnnnnnnnnnnnnnnnnnnnnnnnnnnnnnnnnnnnnnnnnnnnnnnnnnnnnnnnnnnnnnnnnnnnnnnnnnnnnnnnnnnnnnnnnnnnnnnnnnnnnnnnnnnnnnnnnnnnnnnnnnnnnnnnnnnnnnnnnnnnnnnnnnnnnnnnnnnnnnnnnnnnnnnnnnnnnnnnnnnnnnnnnnnnnnnnnnnnnnnnnnnnnnnnnnnnnnnnnnnnnnnnnnnnnnnnnnnnnnnnnnnnnnnnnnnnnnnnnnnnnnnnnnnnnnnnnnnnnnnnnnnnnnnnnnnnnnnnnnnnnnnnnnnnnnnnnnnnnnnnnnnnnnnnnnnnnnnnnnnnnnnnnnnnnnnnnnnnnnnnnnnnnnnnnnnnnnnnnnnnnnnnnnnnnnnnnnnnnnnnnnnnnnnnnnnnnnnnnnnnnnnnnnnnnnnnnnnnnnnnnnnnnnnnnnnnnnnnnnnnnnnnnnnnnnnnnnnnnnnnnnnnnnnnnnnnnnnnnnnnnnnnnnnnnnnnnnnnnnnnnnnnnnnnnnnnnnnnnnnnnnnnnnnnnnnnnnnnnnnnnnnnnnnnnnnnnnnnnnnnnnnnnnnnnnnnnnnnnnnnnnnnnnnnnnnnnnnnnnnnnnnnnnnnnnnnnnnnnnnnnnnnnnnnnnnnnnnnnnnnnnnnnnnnnnnnnnnnnnnnnnnnnnnnnnnnnnnnnnnnnnnnnnnnnnnnnnnnnnnnnnnnnnnnnnnnnnnnnnnnnnnnnnnnnnnnnnnnnnnnnnnnnnnnnnnnnnnnnnnnnnnnnnnnnnnnnnnnnnnnnnnnnnnnnnnnnnnnnnnnnnnnnnnnnnnnnnnnnnnnnnnnnnnnnnnnnnnnnnnnnnnnnnnnnnnnnnnnnnnnnnnnnnnnnnnnnnnnnnnnnnnnnnnnnnnnnnnnnnnnnnnnnnnnnnnnnnnnnnnnnnnnnnnnnnnnnnnnnnnnnnnnnnnnnnnnnnnnnnnnnnnnnnnnnnnnnnnnnnnnnnnnnnnnnnnnnnnnnnnnnnnnnnnnnnnnnnnnnnnnnnnnnnnnnnnnnnnnnnnnnnnnnnnnnnnnnnnnnnnnnnnnnnnnnnnnnnnnnnnnnnnnnnnnnnnnnnnnnnnnnnnnnnnnnnnnnnnnnnnnnnnnnnnnnnnnnnnnnnnnnnnnnnnnnnnnnnnnnnnnnnnnnnnnnnnnnnnnnnnnnnnnnnnnnnnnnnnnnnnnnnnnnnnnnnnnnnnnnnnnnnnnnnnnnnnnnnnnnnnnnnnnnnnnnnnnnnnnnnnnnnnnnnnnnnnnnnnnnnnnnnnnnnnnnnnnnnnnnnnnnnnnnnnnnnnnnnnnnnnnnnnnnnnnnnnnnnnnnnnnnnnnnnnnnnnnnnnnnnnnnnnnnnnnnnnnnnnnnnnnnnnnnnnnnnnnnnnnnnnnnnnnnnnnnnnnnnnnnnnnnnnnnnnnnnnnnnnnnnnnnnnnnnnnnnnnnnnnnnnnnnnnnnnnnnnnnnnnnnnnnnnnnnnnnnnnnnnnnnnnnnnnnnnnnnnnnnnnnnnnnnnnnnnnnnnnnnnnnnnnnnnnnnnnnnnnnnnnnnnnnnnnnnnnnnnnnnnnnnnnnnnnnnnnnnnnnnnnnnnnnnnnnnnnnnnnnnnnnnnnnnnnnnnnnnnnnnnnnnnnnnnnnnnnnnnnnnnnnnnnnnnnnnnnnnnnnnnnnnnnnnnnnnnnnnnnnnnnnnnnnnnnnnnnnnnnnnnnnnnnnnnnnnnnnnnnnnnnnnnnnnnnnnnnnnnnnnnnnnnnnnnnnnnnnnnnnnnnnnnnnnnnnnnnnnnnnnnnnnnnnnnnnnnnnnnnnnnnnnnnnnnnnnnnnnnnnnnnnnnnnnnnnnnnnnnnnnnnnnnnnnnnnnnnnnnnnnnnnnnnnnnnnnnnnnnnnnnnnnnnnnnnnnnnnnnnnnnnnnnnnnnnnnnnnnnnnnnnnnnnnnnnnnnnnnnnnnnnnnnnnnnnnnnnnnnnnnnnnnnnnnnnnnnnnnnnnnnnnnnnnnnnnnnnnnnnnnnnnnnnnnnnnnnnnnnnnnnnnnnnnnnnnnnnnnnnnnnnnnnnnnnnnnnnnnnnnnnnnnnnnnnnnnnnnnnnnnnnnnnnnnnnnnnnnnnnnnnnnnnnnnnnnnnnnnnnnnnnnnnnnnnnnnnnnnnnnnnnnnnnnnnnnnnnnnnnnnnnnnnnnnnnnnnnnnnnnnnnnnnnnnnnnnnnnnnnnnnnnnnnnnnnnnnnnnnnnnnnnnnnnnnnnnnnnnnnnnnnnnnnnnnnnnnnnnnnnnnnnnnnnnnnnnnnnnnnnnnnnnnnnnnnnnnnnnnnnnnnnnnnnnnnnnnnnnnnnnnnnnnnnnnnnnnnnnnnnnnnnnnnnnnnnnnnnnnnnnnnnnnnnnnnnnnnnnnnnnnnnnnnnnnnnnnnnnnnnnnnnnnnnnnnnnnnnnnnnnnnnnnnnnnnnnnnnnnnnnnnnnnnnnnnnnnnnnnnnnnnnnnnnnnnnnnnnnnnnnnnnnnnnnnnnnnnnnnnnnnnnnnnnnnnnnnnnnnnnnnnnnnnnnnnnnnnnnnnnnnnnnnnnnnnnnnnnnnnnnnnnnnnnnnnnnnnnnnnnnnnnnnnnnnnnnnnnnnnnnnnnnnnnnnnnnnnnnnnnnnnnnnnnnnnnnnnnnnnnnnnnnnnnnnnnnnnnnnnnnnnnnnnnnnnnnnnnnnnnnnnnnnnnnnnnnnnnnnnnnnnnnnnnnnnnnnnnnnnnnnnnnnnnnnnnnnnnnnnnnnnnnnnnnnnnnnnnnnnnnnnnnnnnnnnnnnnnnnnnnnnnnnnnnnnnnnnnnnnnnnnnnnnnnnnnnnnnnnnnnnnnnnnnnnnnnnnnnnnnnnnnnnnnnnnnnnnnnnnnnnnnnnnnnnnnnnnnnnnnnnnnnnnnnnnnnnnnnnnnnnnnnnnnnnnnnnnnnnnnnnnnnnnnnnnnnnnnnnnnnnnnnnnnnnnnnnnnnnnnnnnnnnnnnnnnnnnnnnnnnnnnnnnnnnnnnnnnnnnnnnnnnnnnnnnnnnnnnnnnnnnnnnnnnnnnnnnnnnnnnnnnnnnnnnnnnnnnnnnnnnnnnnnnnnnnnnnnnnnnnnnnnnnnnnnnnnnnnnnnnnnnnnnnnnnnnnnnnnnnnnnnnnnnnnnnnnnnnnnnnnnnnnnnnnnnnnnnnnnnnnnnnnnnnnnnnnnnnnnnnnnnnnnnnnnnnnnnnnnnnnnnnnnnnnnnnnnnnnnnnnnnnnnnnnnnnnnnnnnnnnnnnnnnnnnnnnnnnnnnnnnnnnnnnnnnnnnnnnnnnnnnnnnnnnnnnnnnnnnnnnnnnnnnnnnnnnnnnnnnnnnnnnnnnnnnnnnnnnnnnnnnnnnnnnnnnnnnnnnnnnnnnnnnnnnnnnnnnnnnnnnnnnnnnnnnnnnnnnnnnnnnnnnnnnnnnnnnnnnnnnnnnnnnnnnnnnnnnnnnnnnnnnnnnnnnnnnnnnnnnnnnnnnnnnnnnnnnnnnnnnnnnnnnnnnnnnnnnnnnnnnnnnnnnnnnnnnnnnnnnnnnnnnnnnnnnnnnnnnnnnnnnnnnnnnnnnnnnnnnnnnnnnnnnnnnnnnnnnnnnnnnnnnnnnnnnnnnnnnnnnnnnnnnnnnnnnnnnnnnnnnnnnnnnnnnnnnnnnnnnnnnnnnnnnnnnnnnnnnnnnnnnnnnnnnnnnnnnnnnnnnnnnnnnnnnnnnnnnnnnnnnnnnnnnnnnnnnnnnnnnnnnnnnnnnnnnnnnnnnnnnnnnnnnnnnnnnnnnnnnnnnnnnnnnnnnnnnnnnnnnnnnnnnnnnnnnnnnnnnnnnnnnnnnnnnnnnnnnnnnnnnnnnnnnnnnnnnnnnnnnnnnnnnnnnnnnnnnnnnnnnnnnnnnnnnnnnnnnnnnnnnnnnnnnnnnnnnnnnnnnnnnnnnnnnnnnnnnnnnnnnnnnnnnnnnnnnnnnnnnnnnnnnnnnnnnnnnnnnnnnnnnnnnnnnnnnnnnnnnnnnnnnnnnnnnnnnnnnnnnnnnnnnnnnnnnnnnnnnnnnnnnnnnnnnnnnnnnnnnnnnnnnnnnnnnnnnnnnnnnnnnnnnnnnnnnnnnnnnnnnnnnnnnnnnnnnnnnnnnnnnnnnnnnnnnnnnnnnnnnnnnnnnnnnnnnnnnnnnnnnnnnnnnnnnnnnnnnnnnnnnnnnnnnnnnnnnnnnnnnnnnnnnnnnnnnnnnnnnnnnnnnnnnnnnnnnnnnnnnnnnnnnnnnnnnnnnnnnnnnnnnnnnnnnnnnnnnnnnnnnnnnnnnnnnnnnnnnnnnnnnnnnnnnnnnnnnnnnnnnnnnnnnnnnnnnnnnnnnnnnnnnnnnnnnnnnnnnnnnnnnnnnnnnnnnnnnnnnnnnnnnnnnnnnnnnnnnnnnnnnnnnnnnnnnnnnnnnnnnnnnnnnnnnnnnnnnnnnnnnnnnnnnnnnnnnnnnnnnnnnnnnnnnnnnnnnnnnnnnnnnnnnnnnnnnnnnnnnnnnnnnnnnnnnnnnnnnnnnnnnnnnnnnnnnnnnnnnnnnnnnnnnnnnnnnnnnnnnnnnnnnnnnnnnnnnnnnnnnnnnnnnnnnnnnnnnnnnnnnnnnnnnnnnnnnnnnnnnnnnnnnnnnnnnnnnnnnnnnnnnnnnnnnnnnnnnnnnnnnnnnnnnnnnnnnnnnnnnnnnnnnnnnnnnnnnnnnnnnnnnnnnnnnnnnnnnnnnnnnnnnnnnnnnnnnnnnnnnnnnnnnnnnnnnnnnnnnnnnnnnnnnnnnnnnnnnnnnnnnnnnnnnnnnnnnnnnnnnnnnnnnnnnnnnnnnnnnnnnnnnnnnnnnnnnnnnnnnnnnnnnnnnnnnnnnnnnnnnnnnnnnnnnnnnnnnnnnnnnnnnnnnnnnnnnnnnnnnnnnnnnnnnnnnnnnnnnnnnnnnnnnnnnnnnnnnnnnnnnnnnnnnnnnnnnnnnnnnnnnnnnnnnnnnnnnnnnnnnnnnnnnnnnnnnnnnnnnnnnnnnnnnnnnnnnnnnnnnnnnnnnnnnnnnnnnnnnnnnnnnnnnnnnnnnnnnnnnnnnnnnnnnnnnnnnnnnnnnnnnnnnnnnnnnnnnnnnnnnnnnnnnnnnnnnnnnnnnnnnnnnnnnnnnnnnnnnnnnnnnnnnnnnnnnnnnnnnnnnnnnnnnnnnnnnnnnnnnnnnnnnnnnnnnnnnnnnnnnnnnnnnnnnnnnnnnnnnnnnnnnnnnnnnnnnnnnnnnnnnnnnnnnnnnnnnnnnnnnnnnnnnnnnnnnnnnnnnnnnnnnnnnnnnnnnnnnnnnnnnnnnnnnnnnnnnnnnnnnnnnnnnnnnnnnnnnnnnnnnnnnnnnnnnnnnnnnnnnnnnnnnnnnnnnnnnnnnnnnnnnnnnnnnnnnnnnnnnnnnnnnnnnnnnnnnnnnnnnnnnnnnnnnnnnnnnnnnnnnnnnnnnnnnnnnnnnnnnnnnnnnnnnnnnnnnnnnnnnnnnnnnnnnnnnnnnnnnnnnnnnnnnnnnnnnnnnnnnnnnnnnnnnnnnnnnnnnnnnnnnnnnnnnnnnnnnnnnnnnnnnnnnnnnnnnnnnnnnnnnnnnnnnnnnnnnnnnnnnnnnnnnnnnnnnnnnnnnnnnnnnnnnnnnnnnnnnnnnnnnnnnnnnnnnnnnnnnnnnnnnnnnnnnnnnnnnnnnnnnnnnnnnnnnnnnnnnnnnnnnnnnnnnnnnnnnnnnnnnnnnnnnnnnnnnnnnnnnnnnnnnnnnnnnnnnnnnnnnnnnnnnnnnnnnnnnnnnnnnnnnnnnnnnnnnnnnnnnnnnnnnnnnnnnnnnnnnnnnnnnnnnnnnnnnnnnnnnnnnnnnnnnnnnnnnnnnnnnnnnnnnnnnnnnnnnnnnnnnnnnnnnnnnnnnnnnnnnnnnnnnnnnnnnnnnnnnnnnnnnnnnnnnnnnnnnnnnnnnnnnnnnnnnnnnnnnnnnnnnnnnnnnnnnnnnnnnnnnnnnnnnnnnnnnnnnnnnnnnnnnnnnnnnnnnnnnnnnnnnnnnnnnnnnnnnnnnnnnnnnnnnnnnnnnnnnnnnnnnnnnnnnnnnnnnnnnnnnnnnnnnnnnnnnnnnnnnnnnnnnnnnnnnnnnnnnnnnnnnnnnnnnnnnnnnnnnnnnnnnnnnnnnnnnnnnnnnnnnnnnnnnnnnnnnnnnnnnnnnnnnnnnnnnnnnnnnnnnnnnnnnnnnnnnnnnnnnnnnnnnnnnnnnnnnnnnnnnnnnnnnnnnnnnnnnnnnnnnnnnnnnnnnnnnnnnnnnnnnnnnnnnnnnnnnnnnnnnnnnnnnnnnnnnnnnnnnnnnnnnnnnnnnnnnnnnnnnnnnnnnnnnnnnnnnnnnnnnnnnnnnnnnnnnnnnnnnnnnnnnnnnnnnnnnnnnnnnnnnnnnnnnnnnnnnnnnnnnnnnnnnnnnnnnnnnnnnnnnnnnnnnnnnnnnnnnnnnnnnnnnnnnnnnnnnnnnnnnnnnnnnnnnnnnnnnnnnnnnnnnnnnnnnnnnnnnnnnnnnnnnnnnnnnnnnnnnnnnnnnnnnnnnnnnnnnnnnnnnnnnnnnnnnnnnnnnnnnnnnnnnnnnnnnnnnnnnnnnnnnnnnnnnnnnnnnnnnnnnnnnnnnnnnnnnnnnnnnnnnnnnnnnnnnnnnnnnnnnnnnnnnnnnnnnnnnnnnnnnnnnnnnnnnnnnnnnnnnnnnnnnnnnnnnnnnnnnnnnnnnnnnnnnnnnnnnnnnnnnnnnnnnnnnnnnnnnnnnnnnnnnnnnnnnnnnnnnnnnnnnnnnnnnnnnnnnnnnnnnnnnnnnnnnnnnnnnnnnnnnnnnnnnnnnnnnnnnnnnnnnnnnnnnnnnnnnnnnnnnnnnnnnnnnnnnnnnnnnnnnnnnnnnnnnnnnnnnnnnnnnnnnnnnnnnnnnnnnnnnnnnnnnnnnnnnnnnnnnnnnnnnnnnnnnnnnnnnnnnnnnnnnnnnnnnnnnnnnnnnnnnnnnnnnnnnnnnnnnnnnnnnnnnnnnnnnnnnnnnnnnnnnnnnnnnnnnnnnnnnnnnnnnnnnnnnnnnnnnnnnnnnnnnnnnnnnnnnnnnnnnnnnnnnnnnnnnnnnnnnnnnnnnnnnnnnnnnnnnnnnnnnnnnnnnnnnnnnnnnnnnnnnnnnnnnnnnnnnnnnnnnnnnnnnnnnnnnnnnnnnnnnnnnnnnnnnnnnnnnnnnnnnnnnnnnnnnnnnnnnnnnnnnnnnnnnnnnnnnnnnnnnnnnnnnnnnnnnnnnnnnnnnnnnnnnnnnnnnnnnnnnnnnnnnnnnnnnnnnnnnnnnnnnnnnnnnnnnnnnnnnnnnnnnnnnnnnnnnnnnnnnnnnnnnnnnnnnnnnnnnnnnnnnnnnnnnnnnnnnnnnnnnnnnnnnnnnnnnnnnnnnnnnnnnnnnnnnnnnnnnnnnnnnnnnnnnnnnnnnnnnnnnnnnnnnnnnnnnnnnnnnnnnnnnnnnnnnnnnnnnnnnnnnnnnnnnnnnnnnnnnnnnnnnnnnnnnnnnnnnnnnnnnnnnnnnnnnnnnnnnnnnnnnnnnnnnnnnnnnnnnnnnnnnnnnnnnnnnnnnnnnnnnnnnnnnnnnnnnnnnnnnnnnnnnnnnnnnnnnnnnnnnnnnnnnnnnnnnnnnnnnnnnnnnnnnnnnnnnnnnnnnnnnnnnnnnnnnnnnnnnnnnnnnnnnnnnnnnnnnnnnnnnnnnnnnnnnnnnnnnnnnnnnnnnnnnnnnnnnnnnnnnnnnnnnnnnnnnnnnnnnnnnnnnnnnnnnnnnnnnnnnnnnnnnnnnnnnnnnnnnnnnnnnnnnnnnnnnnnnnnnnnnnnnnnnnnnnnnnnnnnnnnnnnnnnnnnnnnnnnnnnnnnnnnnnnnnnnnnnnnnnnnnnnnnnnnnnnnnnnnnnnnnnnnnnnnnnnnnnnnnnnnnnnnnnnnnnnnnnnnnnnnnnnnnnnnnnnnnnnnnnnnnnnnnnnnnnnnnnnnnnnnnnnnnnnnnnnnnnnnnnnnnnnnnnnnnnnnnnnnnnnnnnnnnnnnnnnnnnnnnnnnnnnnnnnnnnnnnnnnnnnnnnnnnnnnnnnnnnnnnnnnnnnnnnnnnnnnnnnnnnnnnnnnnnnnnnnnnnnnnnnnnnnnnnnnnnnnnnnnnnnnnnnnnnnnnnnnnnnnnnnnnnnnnnnnnnnnnnnnnnnnnnnnnnnnnnnnnnnnnnnnnnnnnnnnnnnnnnnnnnnnnnnnnnnnnnnnnnnnnnnnnnnnnnnnnnnnnnnnnnnnnnnnnnnnnnnnnnnnnnnnnnnnnnnnnnnnnnnnnnnnnnnnnnnnnnnnnnnnnnnnnnnnnnnnnnnnnnnnnnnnnnnnnnnnnnnnnnnnnnnnnnnnnnnnnnnnnnnnnnnnnnnnnnnnnnnnnnnnnnnnnnnnnnnnnnnnnnnnnnnnnnnnnnnnnnnnnnnnnnnnnnnnnnnnnnnnnnnnnnnnnnnnnnnnnnnnnnnnnnnnnnnnnnnnnnnnnnnnnnnnnnnnnnnnnnnnnnnnnnnnnnnnnnnnnnnnnnnnnnnnnnnnnnnnnnnnnnnnnnnnnnnnnnnnnnnnnnnnnnnnnnnnnnnnnnnnnnnnnnnnnnnnnnnnnnnnnnnnnnnnnnnnnnnnnnnnnnnnnnnnnnnnnnnnnnnnnnnnnnnnnnnnnnnnnnnnnnnnnnnnnnnnnnnnnnnnnnnnnnnnnnnnnnnnnnnnnnnnnnnnnnnnnnnnnnnnnnnnnnnnnnnnnnnnnnnnnnnnnnnnnnnnnnnnnnnnnnnnnnnnnnnnnnnnnnnnnnnnnnnnnnnnnnnnnnnnnnnnnnnnnnnnnnnnnnnnnnnnnnnnnnnnnnnnnnnnnnnnnnnnnnnnnnnnnnnnnnnnnnnnnnnnnnnnnnnnnnnnnnnnnnnnnnnnnnnnnnnnnnnnnnnnnnnnnnnnnnnnnnnnnnnnnnnnnnnnnnnnnnnnnnnnnnnnnnnnnnnnnnnnnnnnnnnnnnnnnnnnnnnnnnnnnnnnnnnnnnnnnnnnnnnnnnnnnnnnnnnnnnnnnnnnnnnnnnnnnnnnnnnnnnnnnnnnnnnnnnnnnnnnnnnnnnnnnnnnnnnnnnnnnnnnnnnnnnnnnnnnnnnnnnnnnnnnnnnnnnnnnnnnnnnnnnnnnnnnnnnnnnnnnnnnnnnnnnnnnnnnnnnnnnnnnnnnnnnnnnnnnnnnnnnnnnnnnnnnnnnnnnnnnnnnnnnnnnnnnnnnnnnnnnnnnnnnnnnnnnnnnnnnnnnnnnnnnnnnnnnnnnnnnnnnnnnnnnnnnnnnnnnnnnnnnnnnnnnnnnnnnnnnnnnnnnnnnnnnnnnnnnnnnnnnnnnnnnnnnnnnnnnnnnnnnnnnnnnnnnnnnnnnnnnnnnnnnnnnnnnnnnnnnnnnnnnnnnnnnnnnnnnnnnnnnnnnnnnnnnnnnnnnnnnnnnnnnnnnnnnnnnnnnnnnnnnnnnnnnnnnnnnnnnnnnnnnnnnnnnnnnnnnnnnnnnnnnnnnnnnnnnnnnnnnnnnnnnnnnnnnnnnnnnnnnnnnnnnnnnnnnnnnnnnnnnnnnnnnnnnnnnnnnnnnnnnnnnnnnnnnnnnnnnnnnnnnnnnnnnnnnnnnnnnnnnnnnnnnnnnnnnnnnnnnnnnnnnnnnnnnnnnnnnnnnnnnnnnnnnnnnnnnnnnnnnnnnnnnnnnnnnnnnnnnnnnnnnnnnnnnnnnnnnnnnnnnnnnnnnnnnnnnnnnnnnnnnnnnnnnnnnnnnnnnnnnnnnnnnnnnnnnnnnnnnnnnnnnnnnnnnnnnnnnnnnnnnnnnnnnnnnnnnnnnnnnnnnnnnnnnnnnnnnnnnnnnnnnnnnnnnnnnnnnnnnnnnnnnnnnnnnnnnnnnnnnnnnnnnnnnnnnnnnnnnnnnnnnnnnnnnnnnnnnnnnnnnnnnnnnnnnnnnnnnnnnnnnnnnnnnnnnnnnnnnnnnnnnnnnnnnnnnnnnnnnnnnnnnnnnnnnnnnnnnnnnnnnnnnnnnnnnnnnnnnnnnnnnnnnnnnnnnnnnnnnnnnnnnnnnnnnnnnnnnnnnnnnnnnnnnnnnnnnnnnnnnnnnnnnnnnnnnnnnnnnnnnnnnnnnnnnnnnnnnnnnnnnnnnnnnnnnnnnnnnnnnnnnnnnnnnnnnnnnnnnnnnnnnnnnnnnnnnnnnnnnnnnnnnnnnnnnnnnnnnnnnnnnnnnnnnnnnnnnnnnnnnnnnnnnnnnnnnnnnnnnnnnnnnnnnnnnnnnnnnnnnnnnnnnnnnnnnnnnnnnnnnnnnnnnnnnnnnnnnnnnnnnnnnnnnnnnnnnnnnnnnnnnnnnnnnnnnnnnnnnnnnnnnnnnnnnnnnnnnnnnnnnnnnnnnnnnnnnnnnnnnnnnnnnnnnnnnnnnnnnnnnnnnnnnnnnnnnnnnnnnnnnnnnnnnnnnnnnnnnnnnnnnnnnnnnnnnnnnnnnnnnnnnnnnnnnnnnnnnnnnnnnnnnnnnnnnnnnnnnnnnnnnnnnnnnnnnnnnnnnnnnnnnnnnnnnnnnnnnnnnnnnnnnnnnnnnnnnnnnnnnnnnnnnnnnnnnnnnnnnnnnnnnnnnnnnnnnnnnnnnnnnnnnnnnnnnnnnnnnnnnnnnnnnnnnnnnnnnnnnnnnnnnnnnnnnnnnnnnnnnnnnnnnnnnnnnnnnnnnnnnnnnnnnnnnnnnnnnnnnnnnnnnnnnnnnnnnnnnnnnnnnnnnnnnnnnnnnnnnnnnnnnnnnnnnnnnnnnnnnnnnnnnnnnnnnnnnnnnnnnnnnnnnnnnnnnnnnnnnnnnnnnnnnnnnnnnnnnnnnnnnnnnnnnnnnnnnnnnnnnnnnnnnnnnnnnnnnnnnnnnnnnnnnnnnnnnnnnnnnnnnnnnnnnnnnnnnnnnnnnnnnnnnnnnnnnnnnnnnnnnnnnnnnnnnnnnnnnnnnnnnnnnnnnnnnnnnnnnnnnnnnnnnnnnnnnnnnnnnnnnnnnnnnnnnnnnnnnnnnnnnnnnnnnnnnnnnnnnnnnnnnnnnnnnnnnnnnnnnnnnnnnnnnnnnnnnnnnnnnnnnnnnnnnnnnnnnnnnnnnnnnnnnnnnnnnnnnnnnnnnnnnnnnnnnnnnnnnnnnnnnnnnnnnnnnnnnnnnnnnnnnnnnnnnnnnnnnnnnnnnnnnnnnnnnnnnnnnnnnnnnnnnnnnnnnnnnnnnnnnnnnnnnnnnnnnnnnnnnnnnnnnnnnnnnnnnnnnnnnnnnnnnnnnnnnnnnnnnnnnnnnnnnnnnnnnnnnnnnnnnnnnnnnnnnnnnnnnnnnnnnnnnnnnnnnnnnnnnnnnnnnnnnnnnnnnnnnnnnnnnnnnnnnnnnnnnnnnnnnnnnnnnnnnnnnnnnnnnnnnnnnnnnnnnnnnnnnnnnnnnnnnnnnnnnnnnnnnnnnnnnnnnnnnnnnnnnnnnnnnnnnnnnnnnnnnnnnnnnnnnnnnnnnnnnnnnnnnnnnnnnnnnnnnnnnnnnnnnnnnnnnnnnnnnnnnnnnnnnnnnnnnnnnnnnnnnnnnnnnnnnnnnnnnnnnnnnnnnnnnnnnnnnnnnnnnnnnnnnnnnnnnnnnnnnnnnnnnnnnnnnnnnnnnnnnnnnnnnnnnnnnnnnnnnnnnnnnnnnnnnnnnnnnnnnnnnnnnnnnnnnnnnnnnnnnnnnnnnnnnnnnnnnnnnnnnnnnnnnnnnnnnnnnnnnnnnnnnnnnnnnnnnnnnnnnnnnnnnnnnnnnnnnnnnnnnnnnnnnnnnnnnnnnnnnnnnnnnnnnnnnnnnnnnnnnnnnnnnnnnnnnnnnnnnnnnnnnnnnnnnnnnnnnnnnnnnnnnnnnnnnnnnnnnnnnnnnnnnnnnnnnnnnnnnnnnnnnnnnnnnnnnnnnnnnnnnnnnnnnnnnnnnnnnnnnnnnnnnnnnnnnnnnnnnnnnnnnnnnnnnnnnnnnnnnnnnnnnnnnnnnnnnnnnnnnnnnnnnnnnnnnnnnnnnnnnnnnnnnnnnnnnnnnnnnnnnnnnnnnnnnnnnnnnnnnnnnnnnnnnnnnnnnnnnnnnnnnnnnnnnnnnnnnnnnnnnnnnnnnnnnnnnnnnnnnnnnnnnnnnnnnnnnnnnnnnnnnnnnnnnnnnnnnnnnnnnnnnnnnnnnnnnnnnnnnnnnnnnnnnnnnnnnnnnnnnnnnnnnnnnnnnnnnnnnnnnnnnnnnnnnnnnnnnnnnnnnnnnnnnnnnnnnnnnnnnnnnnnnnnnnnnnnnnnnnnnnnnnnnnnnnnnnnnnnnnnnnnnnnnnnnnnnnnnnnnnnnnnnnnnnnnnnnnnnnnnnnnnnnnnnnnnnnnnnnnnnnnnnnnnnnnnnnnnnnnnnnnnnnnnnnnnnnnnnnnnnnnnnnnnnnnnnnnnnnnnnnnnnnnnnnnnnnnnnnnnnnnnnnnnnnnnnnnnnnnnnnnnnnnnnnnnnnnnnnnnnnnnnnnnnnnnnnnnnnnnnnnnnnnnnnnnnnnnnnnnnnnnnnnnnnnnnnnnnnnnnnnnnnnnnnnnnnnnnnnnnnnnnnnnnnnnnnnnnnnnnnnnnnnnnnnnnnnnnnnnnnnnnnnnnnnnnnnnnnnnnnnnnnnnnnnnnnnnnnnnnnnnnnnnnnnnnnnnnnnnnnnnnnnnnnnnnnnnnnnnnnnnnnnnnnnnnnnnnnnnnnnnnnnnnnnnnnnnnnnnnnnnnnnnnnnnnnnnnnnnnnnnnnnnnnnnnnnnnnnnnnnnnnnnnnnnnnnnnnnnnnnnnnnnnnnnnnnnnnnnnnnnnnnnnnnnnnnnnnnnnnnnnnnnnnnnnnnnnnnnnnnnnnnnnnnnnnnnnnnnnnnnnnnnnnnnnnnnnnnnnnnnnnnnnnnnnnnnnnnnnnnnnnnnnnnnnnnnnnnnnnnnnnnnnnnnnnnnnnnnnnnnnnnnnnnnnnnnnnnnnnnnnnnnnnnnnnnnnnnnnnnnnnnnnnnnnnnnnnnnnnnnnnnnnnnnnnnnnnnnnnnnnnnnnnnnnnnnnnnnnnnnnnnnnnnnnnnnnnnnnnnnnnnnnnnnnnnnnnnnnnnnnnnnnnnnnnnnnnnnnnnnnnnnnnnnnnnnnnnnnnnnnnnnnnnnnnnnnnnnnnnnnnnnnnnnnnnnnnnnnnnnnnnnnnnnnnnnnnnnnnnnnnnnnnnnnnnnnnnnnnnnnnnnnnnnnnnnnnnnnnnnnnnnnnnnnnnnnnnnnnnnnnnnnnnnnnnnnnnnnnnnnnnnnnnnnnnnnnnnnnnnnnnnnnnnnnnnnnnnnnnnnnnnnnnnnnnnnnnnnnnnnnnnnnnnnnnnnnnnnnnnnnnnnnnnnnnnnnnnnnnnnnnnnnnnnnnnnnnnnnnnnnnnnnnnnnnnnnnnnnnnnnnnnnnnnnnnnnnnnnnnnnnnnnnnnnnnnnnnnnnnnnnnnnnnnnnnnnnnnnnnnnnnnnnnnnnnnnnnnnnnnnnnnnnnnnnnnnnnnnnnnnnnnnnnnnnnnnnnnnnnnnnnnnnnnnnnnnnnnnnnnnnnnnnnnnnnnnnnnnnnnnnnnnnnnnnnnnnnnnnnnnnnnnnnnnnnnnnnnnnnnnnnnnnnnnnnnnnnnnnnnnnnnnnnnnnnnnnnnnnnnnnnnnnnnnnnnnnnnnnnnnnnnnnnnnnnnnnnnnnnnnnnnnnnnnnnnnnnnnnnnnnnnnnnnnnnnnnnnnnnnnnnnnnnnnnnnnnnnnnnnnnnnnnnnnnnnnnnnnnnnnnnnnnnnnnnnnnnnnnnnnnnnnnnnnnnnnnnnnnnnnnnnnnnnnnnnnnnnnnnnnnnnnnnnnnnnnnnnnnnnnnnnnnnnnnnnnnnnnnnnnnnnnnnnnnnnnnnnnnnnnnnnnnnnnnnnnnnnnnnnnnnnnnnnnnnnnnnnnnnnnnnnnnnnnnnnnnnnnnnnnnnnnnnnnnnnnnnnnnnnnnnnnnnnnnnnnnnnnnnnnnnnnnnnnnnnnnnnnnnnnnnnnnnnnnnnnnnnnnnnnnnnnnnnnnnnnnnnnnnnnnnnnnnnnnnnnnnnnnnnnnnnnnnnnnnnnnnnnnnnnnnnnnnnnnnnnnnnnnnnnnnnnnnnnnnnnnnnnnnnnnnnnnnnnnnnnnnnnnnnnnnnnnnnnnnnnnnnnnnnnnnnnnnnnnnnnnnnnnnnnnnnnnnnnnnnnnnnnnnnnnnnnnnnnnnnnnnnnnnnnnnnnnnnnnnnnnnnnnnnnnnnnnnnnnnnnnnnnnnnnnnnnnnnnnnnnnnnnnnnnnnnnnnnnnnnnnnnnnnnnnnnnnnnnnnnnnnnnnnnnnnnnnnnnnnnnnnnnnnnnnnnnnnnnnnnnnnnnnnnnnnnnnnnnnnnnnnnnnnnnnnnnnnnnnnnnnnnnnnnnnnnnnnnnnnnnnnnnnnnnnnnnnnnnnnnnnnnnnnnnnnnnnnnnnnnnnnnnnnnnnnnnnnnnnnnnnnnnnnnnnnnnnnnnnnnnnnnnnnnnnnnnnnnnnnnnnnnnnnnnnnnnnnnnnnnnnnnnnnnnnnnnnnnnnnnnnnnnnnnnnnnnnnnnnnnnnnnnnnnnnnnnnnnnnnnnnnnnnnnnnnnnnnnnnnnnnnnnnnnnnnnnnnnnnnnnnnnnnnnnnnnnnnnnnnnnnnnnnnnnnnnnnnnnnnnnnnnnnnnnnnnnnnnnnnnnnnnnnnnnnnnnnnnnnnnnnnnnnnnnnnnnnnnnnnnnnnnnnnnnnnnnnnnnnnnnnnnnnnnnnnnnnnnnnnnnnnnnnnnnnnnnnnnnnnnnnnnnnnnnnnnnnnnnnnnnnnnnnnnnnnnnnnnnnnnnnnnnnnnnnnnnnnnnnnnnnnnnnnnnnnnnnnnnnnnnnnnnnnnnnnnnnnnnnnnnnnnnnnnnnnnnnnnnnnnnnnnnnnnnnnnnnnnnnnnnnnnnnnnnnnnnnnnnnnnnnnnnnnnnnnnnnnnnnnnnnnnnnnnnnnnnnnnnnnnnnnnnnnnnnnnnnnnnnnnnnnnnnnnnnnnnnnnnnnnnnnnnnnnnnnnnnnnnnnnnnnnnnnnnnnnnnnnnnnnnnnnnnnnnnnnnnnnnnnnnnnnnnnnnnnnnnnnnnnnnnnnnnnnnnnnnnnnnnnnnnnnnnnnnnnnnnnnnnnnnnnnnnnnnnnnnnnnnnnnnnnnnnnnnnnnnnnnnnnnnnnnnnnnnnnnnnnnnnnnnnnnnnnnnnnnnnnnnnnnnnnnnnnnnnnnnnnnnnnnnnnnnnnnnnnnnnnnnnnnnnnnnnnnnnnnnnnnnnnnnnnnnnnnnnnnnnnnnnnnnnnnnnnnnnnnnnnnnnnnnnnnnnnnnnnnnnnnnnnnnnnnnnnnnnnnnnnnnnnnnnnnnnnnnnnnnnnnnnnnnnnnnnnnnnnnnnnnnnnnnnnnnnnnnnnnnnnnnnnnnnnnnnnnnnnnnnnnnnnnnnnnnnnnnnnnnnnnnnnnnnnnnnnnnnnnnnnnnnnnnnnnnnnnnnnnnnnnnnnnnnnnnnnnnnnnnnnnnnnnnnnnnnnnnnnnnnnnnnnnnnnnnnnnnnnnnnnnnnnnnnnnnnnnnnnnnnnnnnnnnnnnnnnnnnnnnnnnnnnnnnnnnnnnnnnnnnnnnnnnnnnnnnnnnnnnnnnnnnnnnnnnnnnnnnnnnnnnnnnnnnnnnnnnnnnnnnnnnnnnnnnnnnnnnnnnnnnnnnnnnnnnnnnnnnnnnnnnnnnnnnnnnnnnnnnnnnnnnnnnnnnnnnnnnnnnnnnnnnnnnnnnnnnnnnnnnnnnnnnnnnnnnnnnnnnnnnnnnnnnnnnnnnnnnnnnnnnnnnnnnnnnnnnnnnnnnnnnnnnnnnnnnnnnnnnnnnnnnnnnnnnnnnnnnnnnnnnnnnnnnnnnnnnnnnnnnnnnnnnnnnnnnnnnnnnnnnnnnnnnnnnnnnnnnnnnnnnnnnnnnnnnnnnnnnnnnnnnnnnnnnnnnnnnnnnnnnnnnnnnnnnnnnnnnnnnnnnnnnnnnnnnnnnnnnnnnnnnnnnnnnnnnnnnnnnnnnnnnnnnnnnnnnnnnnnnnnnnnnnnnnnnnnnnnnnnnnnnnnnnnnnnnnnnnnnnnnnnnnnnnnnnnnnnnnnnnnnnnnnnnnnnnnnnnnnnnnnnnnnnnnnnnnnnnnnnnnnnnnnnnnnnnnnnnnnnnnnnnnnnnnnnnnnnnnnnnnnnnnnnnnnnnnnnnnnnnnnnnnnnnnnnnnnnnnnnnnnnnnnnnnnnnnnnnnnnnnnnnnnnnnnnnnnnnnnnnnnnnnnnnnnnnnnnnnnnnnnnnnnnnnnnnnnnnnnnnnnnnnnnnnnnnnnnnnnnnnnnnnnnnnnnnnnnnnnnnnnnnnnnnnnnnnnnnnnnnnnnnnnnnnnnnnnnnnnnnnnnnnnnnnnnnnnnnnnnnnnnnnnnnnnnnnnnnnnnnnnnnnnnnnnnnnnnnnnnnnnnnnnnnnnnnnnnnnnnnnnnnnnnnnnnnnnnnnnnnnnnnnnnnnnnnnnnnnnnnnnnnnnnnnnnnnnnnnnnnnnnnnnnnnnnnnnnnnnnnnnnnnnnnnnnnnnnnnnnnnnnnnnnnnnnnnnnnnnnnnnnnnnnnnnnnnnnnnnnnnnnnnnnnnnnnnnnnnnnnnnnnnnnnnnnnnnnnnnnnnnnnnnnnnnnnnnnnnnnnnnnnnnnnnnnnnnnnnnnnnnnnnnnnnnnnnnnnnnnnnnnnnnnnnnnnnnnnnnnnnnnnnnnnnnnnnnnnnnnnnnnnnnnnnnnnnnnnnnnnnnnnnnnnnnnnnnnnnnnnnnnnnnnnnnnnnnnnnnnnnnnnnnnnnnnnnnnnnnnnnnnnnnnnnnnnnnnnnnnnnnnnnnnnnnnnnnnnnnnnnnnnnnnnnnnnnnnnnnnnnnnnnnnnnnnnnnnnnnnnnnnnnnnnnnnnnnnnnnnnnnnnnnnnnnnnnnnnnnnnnnnnnnnnnnnnnnnnnnnnnnnnnnnnnnnnnnnnnnnnnnnnnnnnnnnnnnnnnnnnnnnnnnnnnnnnnnnnnnnnnnnnnnnnnnnnnnnnnnnnnnnnnnnnnnnnnnnnnnnnnnnnnnnnnnnnnnnnnnnnnnnnnnnnnnnnnnnnnnnnnnnnnnnnnnnnnnnnnnnnnnnnnnnnnnnnnnnnnnnnnnnnnnnnnnnnnnnnnnnnnnnnnnnnnnnnnnnnnnnnnnnnnnnnnnnnnnnnnnnnnnnnnnnnnnnnnnnnnnnnnnnnnnnnnnnnnnnnnnnnnnnnnnnnnnnnnnnnnnnnnnnnnnnnnnnnnnnnnnnnnnnnnnnnnnnnnnnnnnnnnnnnnnnnnnnnnnnnnnnnnnnnnnnnnnnnnnnnnnnnnnnnnnnnnnnnnnnnnnnnnnnnnnnnnnnnnnnnnnnnnnnnnnnnnnnnnnnnnnnnnnnnnnnnnnnnnnnnnnnnnnnnnnnnnnnnnnnnnnnnnnnnnnnnnnnnnnnnnnnnnnnnnnnnnnnnnnnnnnnnnnnnnnnnnnnnnnnnnnnnnnnnnnnnnnnnnnnnnnnnnnnnnnnnnnnnnnnnnnnnnnnnnnnnnnnnnnnnnnnnnnnnnnnnnnnnnnnnnnnnnnnnnnnnnnnnnnnnnnnnnnnnnnnnnnnnnnnnnnnnnnnnnnnnnnnnnnnnnnnnnnnnnnnnnnnnnnnnnnnnnnnnnnnnnnnnnnnnnnnnnnnnnnnnnnnnnnnnnnnnnnnnnnnnnnnnnnnnnnnnnnnnnnnnnnnnnnnnnnnnnnnnnnnnnnnnnnnnnnnnnnnnnnnnnnnnnnnnnnnnnnnnnnnnnnnnnnnnnnnnnnnnnnnnnnnnnnnnnnnnnnnnnnnnnnnnnnnnnnnnnnnnnnnnnnnnnnnnnnnnnnnnnnnnnnnnnnnnnnnnnnnnnnnnnnnnnnnnnnnnnnnnnnnnnnnnnnnnnnnnnnnnnnnnnnnnnnnnnnnnnnnnnnnnnnnnnnnnnnnnnnnnnnnnnnnnnnnnnnnnnnnnnnnnnnnnnnnnnnnnnnnnnnnnnnnnnnnnnnnnnnnnnnnnnnnnnnnnnnnnnnnnnnnnnnnnnnnnnnnnnnnnnnnnnnnnnnnnnnnnnnnnnnnnnnnnnnnnnnnnnnnnnnnnnnnnnnnnnnnnnnnnnnnnnnnnnnnnnnnnnnnnnnnnnnnnnnnnnnnnnnnnnnnnnnnnnnnnnnnnnnnnnnnnnnnnnnnnnnnnnnnnnnnnnnnnnnnnnnnnnnnnnnnnnnnnnnnnnnnnnnnnnnnnnnnnnnnnnnnnnnnnnnnnnnnnnnnnnnnnnnnnnnnnnnnnnnnnnnnnnnnnnnnnnnnnnnnnnnnnnnnnnnnnnnnnnnnnnnnnnnnnnnnnnnnnnnnnnnnnnnnnnnnnnnnnnnnnnnnnnnnnnnnnnnnnnnnnnnnnnnnnnnnnnnnnnnnnnnnnnnnnnnnnnnnnnnnnnnnnnnnnnnnnnnnnnnnnnnnnnnnnnnnnnnnnnnnnnnnnnnnnnnnnnnnnnnnnnnnnnnnnnnnnnnnnnnnnnnnnnnnnnnnnnnnnnnnnnnnnnnnnnnnnnnnnnnnnnnnnnnnnnnnnnnnnnnnnnnnnnnnnnnnnnnnnnnnnnnnnnnnnnnnnnnnnnnnnnnnnnnnnnnnnnnnnnnnnnnnnnnnnnnnnnnnnnnnnnnnnnnnnnnnnnnnnnnnnnnnnnnnnnnnnnnnnnnnnnnnnnnnnnnnnnnnnnnnnnnnnnnnnnnnnnnnnnnnnnnnnnnnnnnnnnnnnnnnnnnnnnnnnnnnnnnnnnnnnnnnnnnnnnnnnnnnnnnnnnnnnnnnnnnnnnnnnnnnnnnnnnnnnnnnnnnnnnnnnnnnnnnnnnnnnnnnnnnnnnnnnnnnnnnnnnnnnnnnnnnnnnnnnnnnnnnnnnnnnnnnnnnnnnnnnnnnnnnnnnnnnnnnnnnnnnnnnnnnnnnnnnnnnnnnnnnnnnnnnnnnnnnnnnnnnnnnnnnnnnnnnnnnnnnnnnnnnnnnnnnnnnnnnnnnnnnnnnnnnnnnnnnnnnnnnnnnnnnnnnnnnnnnnnnnnnnnnnnnnnnnnnnnnnnnnnnnnnnnnnnnnnnnnnnnnnnnnnnnnnnnnnnnnnnnnnnnnnnnnnnnnnnnnnnnnnnnnnnnnnnnnnnnnnnnnnnnnnnnnnnnnnnnnnnnnnnnnnnnnnnnnnnnnnnnnnnnnnnnnnnnnnnnnnnnnnnnnnnnnnnnnnnnnnnnnnnnnnnnnnnnnnnnnnnnnnnnnnnnnnnnnnnnnnnnnnnnnnnnnnnnnnnnnnnnnnnnnnnnnnnnnnnnnnnnnnnnnnnnnnnnnnnnnnnnnnnnnnnnnnnnnnnnnnnnnnnnnnnnnnnnnnnnnnnnnnnnnnnnnnnnnnnnnnnnnnnnnnnnnnnnnnnnnnnnnnnnnnnnnnnnnnnnnnnnnnnnnnnnnnnnnnnnnnnnnnnnnnnnnnnnnnnnnnnnnnnnnnnnnnnnnnnnnnnnnnnnnnnnnnnnnnnnnnnnnnnnnnnnnnnnnnnnnnnnnnnnnnnnnnnnnnnnnnnnnnnnnnnnnnnnnnnnnnnnnnnnnnnnnnnnnnnnnnnnnnnnnnnnnnnnnnnnnnnnnnnnnnnnnnnnnnnnnnnnnnnnnnnnnnnnnnnnnnnnnnnnnnnnnnnnnnnnnnnnnnnnnnnnnnnnnnnnnnnnnnnnnnnnnnnnnnnnnnnnnnnnnnnnnnnnnnnnnnnnnnnnnnnnnnnnnnnnnnnnnnnnnnnnnnnnnnnnnnnnnnnnnnnnnnnnnnnnnnnnnnnnnnnnnnnnnnnnnnnnnnnnnnnnnnnnnnnnnnnnnnnnnnnnnnnnnnnnnnnnnnnnnnnnnnnnnnnnnnnnnnnnnnnnnnnnnnnnnnnnnnnnnnnnnnnnnnnnnnnnnnnnnnnnnnnnnnnnnnnnnnnnnnnnnnnnnnnnnnnnnnnnnnnnnnnnnnnnnnnnnnnnnnnnnnnnnnnnnnnnnnnnnnnnnnnnnnnnnnnnnnnnnnnnnnnnnnnnnnnnnnnnnnnnnnnnnnnnnnnnnnnnnnnnnnnnnnnnnnnnnnnnnnnnnnnnnnnnnnnnnnnnnnnnnnnnnnnnnnnnnnnnnnnnnnnnnnnnnnnnnnnnnnnnnnnnnnnnnnnnnnnnnnnnnnnnnnnnnnnnnnnnnnnnnnnnnnnnnnnnnnnnnnnnnnnnnnnnnnnnnnnnnnnnnnnnnnnnnnnnnnnnnnnnnnnnnnnnnnnnnnnnnnnnnnnnnnnnnnnnnnnnnnnnnnnnnnnnnnnnnnnnnnnnnnnnnnnnnnnnnnnnnnnnnnnnnnnnnnnnnnnnnnnnnnnnnnnnnnnnnnnnnnnnnnnnnnnnnnnnnnnnnnnnnnnnnnnnnnnnnnnnnnnnnnnnnnnnnnnnnnnnnnnnnnnnnnnnnnnnnnnnnnnnnnnnnnnnnnnnnnnnnnnnnnnnnnnnnnnnnnnnnnnnnnnnnnnnnnnnnnnnnnnnnnnnnnnnnnnnnnnnnnnnnnnnnnnnnnnnnnnnnnnnnnnnnnnnnnnnnnnnnnnnnnnnnnnnnnnnnnnnnnnnnnnnnnnnnnnnnnnnnnnnnnnnnnnnnnnnnnnnnnnnnnnnnnnnnnnnnnnnnnnnnnnnnnnnnnnnnnnnnnnnnnnnnnnnnnnnnnnnnnnnnnnnnnnnnnnnnnnnnnnnnnnnnnnnnnnnnnnnnnnnnnnnnnnnnnnnnnnnnnnnnnnnnnnnnnnnnnnnnnnnnnnnnnnnnnnnnnnnnnnnnnnnnnnnnnnnnnnnnnnnnnnnnnnnnnnnnnnnnnnnnnnnnnnnnnnnnnnnnnnnnnnnnnnnnnnnnnnnnnnnnnnnnnnnnnnnnnnnnnnnnnnnnnnnnnnnnnnnnnnnnnnnnnnnnnnnnnnnnnnnnnnnnnnnnnnnnnnnnnnnnnnnnnnnnnnnnnnnnnnnnnnnnnnnnnnnnnnnnnnnnnnnnnnnnnnnnnnnnnnnnnnnnnnnnnnnnnnnnnnnnnnnnnnnnnnnnnnnnnnnnnnnnnnnnnnnnnnnnnnnnnnnnnnnnnnnnnnnnnnnnnnnnnnnnnnnnnnnnnnnnnnnnnnnnnnnnnnnnnnnnnnnnnnnnnnnnnnnnnnnnnnnnnnnnnnnnnnnnnnnnnnnnnnnnnnnnnnnnnnnnnnnnnnnnnnnnnnnnnnnnnnnnnnnnnnnnnnnnnnnnnnnnnnnnnnnnnnnnnnnnnnnnnnnnnnnnnnnnnnnnnnnnnnnnnnnnnnnnnnnnnnnnnnnnnnnnnnnnnnnnnnnnnnnnnnnnnnnnnnnnnnnnnnnnnnnnnnnnnnnnnnnnnnnnnnnnnnnnnnnnnnnnnnnnnnnnnnnnnnnnnnnnnnnnnnnnnnnnnnnnnnnnnnnnnnnnnnnnnnnnnnnnnnnnnnnnnnnnnnnnnnnnnnnnnnnnnnnnnnnnnnnnnnnnnnnnnnnnnnnnnnnnnnnnnnnnnnnnnnnnnnnnnnnnnnnnnnnnnnnnnnnnnnnnnnnnnnnnnnnnnnnnnnnnnnnnnnnnnnnnnnnnnnnnnnnnnnnnnnnnnnnnnnnnnnnnnnnnnnnnnnnnnnnnnnnnnnnnnnnnnnnnnnnnnnnnnnnnnnnnnnnnnnnnnnnnnnnnnnnnnnnnnnnnnnnnnnnnnnnnnnnnnnnnnnnnnnnnnnnnnnnnnnnnnnnnnnnnnnnnnnnnnnnnnnnnnnnnnnnnnnnnnnnnnnnnnnnnnnnnnnnnnnnnnnnnnnnnnnnnnnnnnnnnnnnnnnnnnnnnnnnnnnnnnnnnnnnnnnnnnnnnnnnnnnnnnnnnnnnnnnnnnnnnnnnnnnnnnnnnnnnnnnnnnnnnnnnnnnnnnnnnnnnnnnnnnnnnnnnnnnnnnnnnnnnnnnnnnnnnnnnnnnnnnnnnnnnnnnnnnnnnnnnnnnnnnnnnnnnnnnnnnnnnnnnnnnnnnnnnnnnnnnnnnnnnnnnnnnnnnnnnnnnnnnnnnnnnnnnnnnnnnnnnnnnnnnnnnnnnnnnnnnnnnnnnnnnnnnnnnnnnnnnnnnnnnnnnnnnnnnnnnnnnnnnnnnnnnnnnnnnnnnnnnnnnnnnnnnnnnnnnnnnnnnnnnnnnnnnnnnnnnnnnnnnnnnnnnnnnnnnnnnnnnnnnnnnnnnnnnnnnnnnnnnnnnnnnnnnnnnnnnnnnnnnnnnnnnnnnnnnnnnnnnnnnnnnnnnnnnnnnnnnnnnnnnnnnnnnnnnnnnnnnnnnnnnnnnnnnnnnnnnnnnnnnnnnnnnnnnnnnnnnnnnnnnnnnnnnnnnnnnnnnnnnnnnnnnnnnnnnnnnnnnnnnnnnnnnnnnnnnnnnnnnnnnnnnnnnnnnnnnnnnnnnnnnnnnnnnnnnnnnnnnnnnnnnnnnnnnnnnnnnnnnnnnnnnnnnnnnnnnnnnnnnnnnnnnnnnnnnnnnnnnnnnnnnnnnnnnnnnnnnnnnnnnnnnnnnnnnnnnnnnnnnnnnnnnnnnnnnnnnnnnnnnnnnnnnnnnnnnnnnnnnnnnnnnnnnnnnnnnnnnnnnnnnnnnnnnnnnnnnnnnnnnnnnnnnnnnnnnnnnnnnnnnnnnnnnnnnnnnnnnnnnnnnnnnnnnnnnnnnnnnnnnnnnnnnnnnnnnnnnnnnnnnnnnnnnnnnnnnnnnnnnnnnnnnnnnnnnnnnnnnnnnnnnnnnnnnnnnnnnnnnnnnnnnnnnnnnnnnnnnnnnnnnnnnnnnnnnnnnnnnnnnnnnnnnnnnnnnnnnnnnnnnnnnnnnnnnnnnnnnnnnnnnnnnnnnnnnnnnnnnnnnnnnnnnnnnnnnnnnnnnnnnnnnnnnnnnnnnnnnnnnnnnnnnnnnnnnnnnnnnnnnnnnnnnnnnnnnnnnnnnnnnnnnnnnnnnnnnnnnnnnnnnnnnnnnnnnnnnnnnnnnnnnnnnnnnnnnnnnnnnnnnnnnnnnnnnnnnnnnnnnnnnnnnnnnnnnnnnnnnnnnnnnnnnnnnnnnnnnnnnnnnnnnnnnnnnnnnnnnnnnnnnnnnnnnnnnnnnnnnnnnnnnnnnnnnnnnnnnnnnnnnnnnnnnnnnnnnnnnnnnnnnnnnnnnnnnnnnnnnnnnnnnnnnnnnnnnnnnnnnnnnnnnnnnnnnnnnnnnnnnnnnnnnnnnnnnnnnnnnnnnnnnnnnnnnnnnnnnnnnnnnnnnnnnnnnnnnnnnnnnnnnnnnnnnnnnnnnnnnnnnnnnnnnnnnnnnnnnnnnnnnnnnnnnnnnnnnnnnnnnnnnnnnnnnnnnnnnnnnnnnnnnnnnnnnnnnnnnnnnnnnnnnnnnnnnnnnnnnnnnnnnnnnnnnnnnnnnnnnnnnnnnnnnnnnnnnnnnnnnnnnnnnnnnnnnnnnnnnnnnnnnnnnnnnnnnnnnnnnnnnnnnnnnnnnnnnnnnnnnnnnnnnnnnnnnnnnnnnnnnnnnnnnnnnnnnnnnnnnnnnnnnnnnnnnnnnnnnnnnnnnnnnnnnnnnnnnnnnnnnnnnnnnnnnnnnnnnnnnnnnnnnnnnnnnnnnnnnnnnnnnnnnnnnnnnnnnnnnnnnnnnnnnnnnnnnnnnnnnnnnnnnnnnnnnnnnnnnnnnnnnnnnnnnnnnnnnnnnnnnnnnnnnnnnnnnnnnnnnnnnnnnnnnnnnnnnnnnnnnnnnnnnnnnnnnnnnnnnnnnnnnnnnnnnnnnnnnnnnnnnnnnnnnnnnnnnnnnnnnnnnnnnnnnnnnnnnnnnnnnnnnnnnnnnnnnnnnnnnnnnnnnnnnnnnnnnnnnnnnnnnnnnnnnnnnnnnnnnnnnnnnnnnnnnnnnnnnnnnnnnnnnnnnnnnnnnnnnnnnnnnnnnnnnnnnnnnnnnnnnnnnnnnnnnnnnnnnnnnnnnnnnnnnnnnnnnnnnnnnnnnnnnnnnnnnnnnnnnnnnnnnnnnnnnnnnnnnnnnnnnnnnnnnnnnnnnnnnnnnnnnnnnnnnnnnnnnnnnnnnnnnnnnnnnnnnnnnnnnnnnnnnnnnnnnnnnnnnnnnnnnnnnnnnnnnnnnnnnnnnnnnnnnnnnnnnnnnnnnnnnnnnnnnnnnnnnnnnnnnnnnnnnnnnnnnnnnnnnnnnnnnnnnnnnnnnnnnnnnnnnnnnnnnnnnnnnnnnnnnnnnnnnnnnnnnnnnnnnnnnnnnnnnnnnnnnnnnnnnnnnnnnnnnnnnnnnnnnnnnnnnnnnnnnnnnnnnnnnnnnnnnnnnnnnnnnnnnnnnnnnnnnnnnnnnnnnnnnnnnnnnnnnnnnnnnnnnnnnnnnnnnnnnnnnnnnnnnnnnnnnnnnnnnnnnnnnnnnnnnnnnnnnnnnnnnnnnnnnnnnnnnnnnnnnnnnnnnnnnnnnnnnnnnnnnnnnnnnnnnnnnnnnnnnnnnnnnnnnnnnnnnnnnnnnnnnnnnnnnnnnnnnnnnnnnnnnnnnnnnnnnnnnnnnnnnnnnnnnnnnnnnnnnnnnnnnnnnnnnnnnnnnnnnnnnnnnnnnnnnnnnnnnnnnnnnnnnnnnnnnnnnnnnnnnnnnnnnnnnnnnnnnnnnnnnnnnnnnnnnnnnnnnnnnnnnnnnnnnnnnnnnnnnnnnnnnnnnnnnnnnnnnnnnnnnnnnnnnnnnnnnnnnnnnnnnnnnnnnnnnnnnnnnnnnnnnnnnnnnnnnnnnnnnnnnnnnnnnnnnnnnnnnnnnnnnnnnnnnnnnnnnnnnnnnnnnnnnnnnnnnnnnnnnnnnnnnnnnnnnnnnnnnnnnnnnnnnnnnnnnnnnnnnnnnnnnnnnnnnnnnnnnnnnnnnnnnnnnnnnnnnnnnnnnnnnnnnnnnnnnnnnnnnnnnnnnnnnnnnnnnnnnnnnnnnnnnnnnnnnnnnnnnnnnnnnnnnnnnnnnnnnnnnnnnnnnnnnnnnnnnnnnnnnnnnnnnnnnnnnnnnnnnnnnnnnnnnnnnnnnnnnnnnnnnnnnnnnnnnnnnnnnnnnnnnnnnnnnnnnnnnnnnnnnnnnnnnnnnnnnnnnnnnnnnnnnnnnnnnnnnnnnnnnnnnnnnnnnnnnnnnnnnnnnnnnnnnnnnnnnnnnnnnnnnnnnnnnnnnnnnnnnnnnnnnnnnnnnnnnnnnnnnnnnnnnnnnnnnnnnnnnnnnnnnnnnnnnnnnnnnnnnnnnnnnnnnnnnnnnnnnnnnnnnnnnnnnnnnnnnnnnnnnnnnnnnnnnnnnnnnnnnnnnnnnnnnnnnnnnnnnnnnnnnnnnnnnnnnnnnnnnnnnnnnnnnnnnnnnnnnnnnnnnnnnnnnnnnnnnnnnnnnnnnnnnnnnnnnnnnnnnnnnnnnnnnnnnnnnnnnnnnnnnnnnnnnnnnnnnnnnnnnnnnnnnnnnnnnnnnnnnnnnnnnnnnnnnnnnnnnnnnnnnnnnnnnnnnnnnnnnnnnnnnnnnnnnnnnnnnnnnnnnnnnnnnnnnnnnnnnnnnnnnnnnnnnnnnnnnnnnnnnnnnnnnnnnnnnnnnnnnnnnnnnnnnnnnnnnnnnnnnnnnnnnnnnnnnnnnnnnnnnnnnnnnnnnnnnnnnnnnnnnnnnnnnnnnnnnnnnnnnnnnnnnnnnnnnnnnnnnnnnnnnnnnnnnnnnnnnnnnnnnnnnnnnnnnnnnnnnnnnnnnnnnnnnnnnnnnnnnnnnnnnnnnnnnnnnnnnnnnnnnnnnnnnnnnnnnnnnnnnnnnnnnnnnnnnnnnnnnnnnnnnnnnnnnnnnnnnnnnnnnnnnnnnnnnnnnnnnnnnnnnnnnnnnnnnnnnnnnnnnnnnnnnnnnnnnnnnnnnnnnnnnnnnnnnnnnnnnnnnnnnnnnnnnnnnnnnnnnnnnnnnnnnnnnnnnnnnnnnnnnnnnnnnnnnnnnnnnnnnnnnnnnnnnnnnnnnnnnnnnnnnnnnnnnnnnnnnnnnnnnnnnnnnnnnnnnnnnnnnnnnnnnnnnnnnnnnnnnnnnnnnnnnnnnnnnnnnnnnnnnnnnnnnnnnnnnnnnnnnnnnnnnnnnnnnnnnnnnnnnnnnnnnnnnnnnnnnnnnnnnnnnnnnnnnnnnnnnnnnnnnnnnnnnnnnnnnnnnnnnnnnnnnnnnnnnnnnnnnnnnnnnnnnnnnnnnnnnnnnnnnnnnnnnnnnnnnnnnnnnnnnnnnnnnnnnnnnnnnnnnnnnnnnnnnnnnnnnnnnnnnnnnnnnnnnnnnnnnnnnnnnnnnnnnnnnnnnnnnnnnnnnnnnnnnnnnnnnnnnnnnnnnnnnnnnnnnnnnnnnnnnnnnnnnnnnnnnnnnnnnnnnnnnnnnnnnnnnnnnnnnnnnnnnnnnnnnnnnnnnnnnnnnnnnnnnnnnnnnnnnnnnnnnnnnnnnnnnnnnnnnnnnnnnnnnnnnnnnnnnnnnnnnnnnnnnnnnnnnnnnnnnnnnnnnnnnnnnnnnnnnnnnnnnnnnnnnnnnnnnnnnnnnnnnnnnnnnnnnnnnnnnnnnnnnnnnnnnnnnnnnnnnnnnnnnnnnnnnnnnnnnnnnnnnnnnnnnnnnnnnnnnnnnnnnnnnnnnnnnnnnnnnnnnnnnnnnnnnnnnnnnnnnnnnnnnnnnnnnnnnnnnnnnnnnnnnnnnnnnnnnnnnnnnnnnnnnnnnnnnnnnnnnnnnnnnnnnnnnnnnnnnnnnnnnnnnnnnnnnnnnnnnnnnnnnnnnnnnnnnnnnnnnnnnnnnnnnnnnnnnnnnnnnnnnnnnnnnnnnnnnnnnnnnnnnnnnnnnnnnnnnnnnnnnnnnnnnnnnnnnnnnnnnnnnnnnnnnnnnnnnnnnnnnnnnnnnnnnnnnnnnnnnnnnnnnnnnnnnnnnnnnnnnnnnnnnnnnnnnnnnnnnnnnnnnnnnnnnnnnnnnnnnnnnnnnnnnnnnnnnnnnnnnnnnnnnnnnnnnnnnnnnnnnnnnnnnnnnnnnnnnnnnnnnnnnnnnnnnnnnnnnnnnnnnnnnnnnnnnnnnnnnnnnnnnnnnnnnnnnnnnnnnnnnnnnnnnnnnnnnnnnnnnnnnnnnnnnnnnnnnnnnnnnnnnnnnnnnnnnnnnnnnnnnnnnnnnnnnnnnnnnnnnnnnnnnnnnnnnnnnnnnnnnnnnnnnnnnnnnnnnnnnnnnnnnnnnnnnnnnnnnnnnnnnnnnnnnnnnnnnnnnnnnnnnnnnnnnnnnnnnnnnnnnnnnnnnnnnnnnnnnnnnnnnnnnnnnnnnnnnnnnnnnnnnnnnnnnnnnnnnnnnnnnnnnnnnnnnnnnnnnnnnnnnnnnnnnnnnnnnnnnnnnnnnnnnnnnnnnnnnnnnnnnnnnnnnnnnnnnnnnnnnnnnnnnnnnnnnnnnnnnnnnnnnnnnnnnnnnnnnnnnnnnnnnnnnnnnnnnnnnnnnnnnnnnnnnnnnnnnnnnnnnnnnnnnnnnnnnnnnnnnnnnnnnnnnnnnnnnnnnnnnnnnnnnnnnnnnnnnnnnnnnnnnnnnnnnnnnnnnnnnnnnnnnnnnnnnnnnnnnnnnnnnnnnnnnnnnnnnnnnnnnnnnnnnnnnnnnnnnnnnnnnnnnnnnnnnnnnnnnnnnnnnnnnnnnnnnnnnnnnnnnnnnnnnnnnnnnnnnnnnnnnnnnnnnnnnnnnnnnnnnnnnnnnnnnnnnnnnnnnnnnnnnnnnnnnnnnnnnnnnnnnnnnnnnnnnnnnnnnnnnnnnnnnnnnnnnnnnnnnnnnnnnnnnnnnnnnnnnnnnnnnnnnnnnnnnnnnnnnnnnnnnnnnnnnnnnnnnnnnnnnnnnnnnnnnnnnnnnnnnnnnnnnnnnnnnnnnnnnnnnnnnnnnnnnnnnnnnnnnnnnnnnnnnnnnnnnnnnnnnnnnnnnnnnnnnnnnnnnnnnnnnnnnnnnnnnnnnnnnnnnnnnnnnnnnnnnnnnnnnnnnnnnnnnnnnnnnnnnnnnnnnnnnnnnnnnnnnnnnnnnnnnnnnnnnnnnnnnnnnnnnnnnnnnnnnnnnnnnnnnnnnnnnnnnnnnnnnnnnnnnnnnnnnnnnnnnnnnnnnnnnnnnnnnnnnnnnnnnnnnnnnnnnnnnnnnnnnnnnnnnnnnnnnnnnnnnnnnnnnnnnnnnnnnnnnnnnnnnnnnnnnnnnnnnnnnnnnnnnnnnnnnnnnnnnnnnnnnnnnnnnnnnnnnnnnnnnnnnnnnnnnnnnnnnnnnnnnnnnnnnnnnnnnnnnnnnnnnnnnnnnnnnnnnnnnnnnnnnnnnnnnnnnnnnnnnnnnnnnnnnnnnnnnnnnnnnnnnnnnnnnnnnnnnnnnnnnnnnnnnnnnnnnnnnnnnnnnnnnnnnnnnnnnnnnnnnnnnnnnnnnnnnnnnnnnnnnnnnnnnnnnnnnnnnnnnnnnnnnnnnnnnnnnnnnnnnnnnnnnnnnnnnnnnnnnnnnnnnnnnnnnnnnnnnnnnnnnnnnnnnnnnnnnnnnnnnnnnnnnnnnnnnnnnnnnnnnnnnnnnnnnnnnnnnnnnnnnnnnnnnnnnnnnnnnnnnnnnnnnnnnnnnnnnnnnnnnnnnnnnnnnnnnnnnnnnnnnnnnnnnnnnnnnnnnnnnnnnnnnnnnnnnnnnnnnnnnnnnnnnnnnnnnnnnnnnnnnnnnnnnnnnnnnnnnnnnnnnnnnnnnnnnnnnnnnnnnnnnnnnnnnnnnnnnnnnnnnnnnnnnnnnnnnnnnnnnnnnnnnnnnnnnnnnnnnnnnnnnnnnnnnnnnnnnnnnnnnnnnnnnnnnnnnnnnnnnnnnnnnnnnnnnnnnnnnnnnnnnnnnnnnnnnnnnnnnnnnnnnnnnnnnnnnnnnnnnnnnnnnnnnnnnnnnnnnnnnnnnnnnnnnnnnnnnnnnnnnnnnnnnnnnnnnnnnnnnnnnnnnnnnnnnnnnnnnnnnnnnnnnnnnnnnnnnnnnnnnnnnnnnnnnnnnnnnnnnnnnnnnnnnnnnnnnnnnnnnnnnnnnnnnnnnnnnnnnnnnnnnnnnnnnnnnnnnnnnnnnnnnnnnnnnnnnnnnnnnnnnnnnnnnnnnnnnnnnnnnnnnnnnnnnnnnnnnnnnnnnnnnnnnnnnnnnnnnnnnnnnnnnnnnnnnnnnnnnnnnnnnnnnnnnnnnnnnnnnnnnnnnnnnnnnnnnnnnnnnnnnnnnnnnnnnnnnnnnnnnnnnnnnnnnnnnnnnnnnnnnnnnnnnnnnnnnnnnnnnnnnnnnnnnnnnnnnnnnnnnnnnnnnnnnnnnnnnnnnnnnnnnnnnnnnnnnnnnnnnnnnnnnnnnnnnnnnnnnnnnnnnnnnnnnnnnnnnnnnnnnnnnnnnnnnnnnnnnnnnnnnnnnnnnnnnnnnnnnnnnnnnnnnnnnnnnnnnnnnnnnnnnnnnnnnnnnnnnnnnnnnnnnnnnnnnnnnnnnnnnnnnnnnnnnnnnnnnnnnnnnnnnnnnnnnnnnnnnnnnnnnnnnnnnnnnnnnnnnnnnnnnnnnnnnnnnnnnnnnnnnnnnnnnnnnnnnnnnnnnnnnnnnnnnnnnnnnnnnnnnnnnnnnnnnnnnnnnnnnnnnnnnnnnnnnnnnnnnnnnnnnnnnnnnnnnnnnnnnnnnnnnnnnnnnnnnnnnnnnnnnnnnnnnnnnnnnnnnnnnnnnnnnnnnnnnnnnnnnnnnnnnnnnnnnnnnnnnnnnnnnnnnnnnnnnnnnnnnnnnnnnnnnnnnnnnnnnnnnnnnnnnnnnnnnnnnnnnnnnnnnnnnnnnnnnnnnnnnnnnnnnnnnnnnnnnnnnnnnnnnnnnnnnnnnnnnnnnnnnnnnnnnnnnnnnnnnnnnnnnnnnnnnnnnnnnnnnnnnnnnnnnnnnnnnnnnnnnnnnnnnnnnnnnnnnnnnnnnnnnnnnnnnnnnnnnnnnnnnnnnnnnnnnnnnnnnnnnnnnnnnnnnnnnnnnnnnnnnnnnnnnnnnnnnnnnnnnnnnnnnnnnnnnnnnnnnnnnnnnnnnnnnnnnnnnnnnnnnnnnnnnnnnnnnnnnnnnnnnnnnnnnnnnnnnnnnnnnnnnnnnnnnnnnnnnnnnnnnnnnnnnnnnnnnnnnnnnnnnnnnnnnnnnnnnnnnnnnnnnnnnnnnnnnnnnnnnnnnnnnnnnnnnnnnnnnnnnnnnnnnnnnnnnnnnnnnnnnnnnnnnnnnnnnnnnnnnnnnnnnnnnnnnnnnnnnnnnnnnnnnnnnnnnnnnnnnnnnnnnnnnnnnnnnnnnnnnnnnnnnnnnnnnnnnnnnnnnnnnnnnnnnnnnnnnnnnnnnnnnnnnnnnnnnnnnnnnnnnnnnnnnnnnnnnnnnnnnnnnnnnnnnnnnnnnnnnnnnnnnnnnnnnnnnnnnnnnnnnnnnnnnnnnnnnnnnnnnnnnnnnnnnnnnnnnnnnnnnnnnnnnnnnnnnnnnnnnnnnnnnnnnnnnnnnnnnnnnnnnnnnnnnnnnnnnnnnnnnnnnnnnnnnnnnnnnnnnnnnnnnnnnnnnnnnnnnnnnnnnnnnnnnnnnnnnnnnnnnnnnnnnnnnnnnnnnnnnnnnnnnnnnnnnnnnnnnnnnnnnnnnnnnnnnnnnnnnnnnnnnnnnnnnnnnnnnnnnnnnnnnnnnnnnnnnnnnnnnnnnnnnnnnnnnnnnnnnnnnnnnnnnnnnnnnnnnnnnnnnnnnnnnnnnnnnnnnnnnnnnnnnnnnnnnnnnnnnnnnnnnnnnnnnnnnnnnnnnnnnnnnnnnnnnnnnnnnnnnnnnnnnnnnnnnnnnnnnnnnnnnnnnnnnnnnnnnnnnnnnnnnnnnnnnnnnnnnnnnnnnnnnnnnnnnnnnnnnnnnnnnnnnnnnnnnnnnnnnnnnnnnnnnnnnnnnnnnnnnnnnnnnnnnnnnnnnnnnnnnnnnnnnnnnnnnnnnnnnnnnnnnnnnnnnnnnnnnnnnnnnnnnnnnnnnnnnnnnnnnnnnnnnnnnnnnnnnnnnnnnnnnnnnnnnnnnnnnnnnnnnnnnnnnnnnnnnnnnnnnnnnnnnnnnnnnnnnnnnnnnnnnnnnnnnnnnnnnnnnnnnnnnnnnnnnnnnnnnnnnnnnnnnnnnnnnnnnnnnnnnnnnnnnnnnnnnnnnnnnnnnnnnnnnnnnnnnnnnnnnnnnnnnnnnnnnnnnnnnnnnnnnnnnnnnnnnnnnnnnnnnnnnnnnnnnnnnnnnnnnnnnnnnnnnnnnnnnnnnnnnnnnnnnnnnnnnnnnnnnnnnnnnnnnnnnnnnnnnnnnnnnnnnnnnnnnnnnnnnnnnnnnnnnnnnnnnnnnnnnnnnnnnnnnnnnnnnnnnnnnnnnnnnnnnnnnnnnnnnnnnnnnnnnnnnnnnnnnnnnnnnnnnnnnnnnnnnnnnnnnnnnnnnnnnnnnnnnnnnnnnnnnnnnnnnnnnnnnnnnnnnnnnnnnnnnnnnnnnnnnnnnnnnnnnnnnnnnnnnnnnnnnnnnnnnnnnnnnnnnnnnnnnnnnnnnnnnnnnnnnnnnnnnnnnnnnnnnnnnnnnnnnnnnnnnnnnnnnnnnnnnnnnnnnnnnnnnnnnnnnnnnnnnnnnnnnnnnnnnnnnnnnnnnnnnnnnnnnnnnnnnnnnnnnnnnnnnnnnnnnnnnnnnnnnnnnnnnnnnnnnnnnnnnnnnnnnnnnnnnnnnnnnnnnnnnnnnnnnnnnnnnnnnnnnnnnnnnnnnnnnnnnnnnnnnnnnnnnnnnnnnnnnnnnnnnnnnnnnnnnnnnnnnnnnnnnnnnnnnnnnnnnnnnnnnnnnnnnnnnnnnnnnnnnnnnnnnnnnnnnnnnnnnnnnnnnnnnnnnnnnnnnnnnnnnnnnnnnnnnnnnnnnnnnnnnnnnnnnnnnnnnnnnnnnnnnnnnnnnnnnnnnnnnnnnnnnnnnnnnnnnnnnnnnnnnnnnnnnnnnnnnnnnnnnnnnnnnnnnnnnnnnnnnnnnnnnnnnnnnnnnnnnnnnnnnnnnnnnnnnnnnnnnnnnnnnnnnnnnnnnnnnnnnnnnnnnnnnnnnnnnnnnnnnnnnnnnnnnnnnnnnnnnnnnnnnnnnnnnnnnnnnnnnnnnnnnnnnnnnnnnnnnnnnnnnnnnnnnnnnnnnnnnnnnnnnnnnnnnnnnnnnnnnnnnnnnnnnnnnnnnnnnnnnnnnnnnnnnnnnnnnnnnnnnnnnnnnnnnnnnnnnnnnnnnnnnnnnnnnnnnnnnnnnnnnnnnnnnnnnnnnnnnnnnnnnnnnnnnnnnnnnnnnnnnnnnnnnnnnnnnnnnnnnnnnnnnnnnnnnnnnnnnnnnnnnnnnnnnnnnnnnnnnnnnnnnnnnnnnnnnnnnnnnnnnnnnnnnnnnnnnnnnnnnnnnnnnnnnnnnnnnnnnnnnnnnnnnnnnnnnnnnnnnnnnnnnnnnnnnnnnnnnnnnnnnnnnnnnnnnnnnnnnnnnnnnnnnnnnnnnnnnnnnnnnnnnnnnnnnnnnnnnnnnnnnnnnnnnnnnnnnnnnnnnnnnnnnnnnnnnnnnnnnnnnnnnnnnnnnnnnnnnnnnnnnnnnnnnnnnnnnnnnnnnnnnnnnnnnnnnnnnnnnnnnnnnnnnnnnnnnnnnnnnnnnnnnnnnnnnnnnnnnnnnnnnnnnnnnnnnnnnnnnnnnnnnnnnnnnnnnnnnnnnnnnnnnnnnnnnnnnnnnnnnnnnnnnnnnnnnnnnnnnnnnnnnnnnnnnnnnnnnnnnnnnnnnnnnnnnnnnnnnnnnnnnnnnnnnnnnnnnnnnnnnnnnnnnnnnnnnnnnnnnnnnnnnnnnnnnnnnnnnnnnnnnnnnnnnnnnnnnnnnnnnnnnnnnnnnnnnnnnnnnnnnnnnnnnnnnnnnnnnnnnnnnnnnnnnnnnnnnnnnnnnnnnnnnnnnnnnnnnnnnnnnnnnnnnnnnnnnnnnnnnnnnnnnnnnnnnnnnnnnnnnnnnnnnnnnnnnnnnnnnnnnnnnnnnnnnnnnnnnnnnnnnnnnnnnnnnnnnnnnnnnnnnnnnnnnnnnnnnnnnnnnnnnnnnnnnnnnnnnnnnnnnnnnnnnnnnnnnnnnnnnnnnnnnnnnnnnnnnnnnnnnnnnnnnnnnnnnnnnnnnnnnnnnnnnnnnnnnnnnnnnnnnnnnnnnnnnnnnnnnnnnnnnnnnnnnnnnnnnnnnnnnnnnnnnnnnnnnnnnnnnnnnnnnnnnnnnnnnnnnnnnnnnnnnnnnnnnnnnnnnnnnnnnnnnnnnnnnnnnnnnnnnnnnnnnnnnnnnnnnnnnnnnnnnnnnnnnnnnnnnnnnnnnnnnnnnnnnnnnnnnnnnnnnnnnnnnnnnnnnnnnnnnnnnnnnnnnnnnnnnnnnnnnnnnnnnnnnnnnnnnnnnnnnnnnnnnnnnnnnnnnnnnnnnnnnnnnnnnnnnnnnnnnnnnnnnnnnnnnnnnnnnnnnnnnnnnnnnnnnnnnnnnnnnnnnnnnnnnnnnnnnnnnnnnnnnnnnnnnnnnnnnnnnnnnnnnnnnnnnnnnnnnnnnnnnnnnnnnnnnnnnnnnnnnnnnnnnnnnnnnnnnnnnnnnnnnnnnnnnnnnnnnnnnnnnnnnnnnnnnnnnnnnnnnnnnnnnnnnnnnnnnnnnnnnnnnnnnnnnnnnnnnnnnnnnnnnnnnnnnnnnnnnnnnnnnnnnnnnnnnnnnnnnnnnnnnnnnnnnnnnnnnnnnnnnnnnnnnnnnnnnnnnnnnnnnnnnnnnnnnnnnnnnnnnnnnnnnnnnnnnnnnnnnnnnnnnnnnnnnnnnnnnnnnnnnnnnnnnnnnnnnnnnnnnnnnnnnnnnnnnnnnnnnnnnnnnnnnnnnnnnnnnnnnnnnnnnnnnnnnnnnnnnnnnnnnnnnnnnnnnnnnnnnnnnnnnnnnnnnnnnnnnnnnnnnnnnnnnnnnnnnnnnnnnnnnnnnnnnnnnnnnnnnnnnnnnnnnnnnnnnnnnnnnnnnnnnnnnnnnnnnnnnnnnnnnnnnnnnnnnnnnnnnnnnnnnnnnnnnnnnnnnnnnnnnnnnnnnnnnnnnnnnnnnnnnnnnnnnnnnnnnnnnnnnnnnnnnnnnnnnnnnnnnnnnnnnnnnnnnnnnnnnnnnnnnnnnnnnnnnnnnnnnnnnnnnnnnnnnnnnnnnnnnnnnnnnnnnnnnnnnnnnnnnnnnnnnnnnnnnnnnnnnnnnnnnnnnnnnnnnnnnnnnnnnnnnnnnnnnnnnnnnnnnnnnnnnnnnnnnnnnnnnnnnnnnnnnnnnnnnnnnnnnnnnnnnnnnnnnnnnnnnnnnnnnnnnnnnnnnnnnnnnnnnnnnnnnnnnnnnnnnnnnnnnnnnnnnnnnnnnnnnnnnnnnnnnnnnnnnnnnnnnnnnnnnnnnnnnnnnnnnnnnnnnnnnnnnnnnnnnnnnnnnnnnnnnnnnnnnnnnnnnnnnnnnnnnnnnnnnnnnnnnnnnnnnnnnnnnnnnnnnnnnnnnnnnnnnnnnnnnnnnnnnnnnnnnnnnnnnnnnnnnnnnnnnnnnnnnnnnnnnnnnnnnnnnnnnnnnnnnnnnnnnnnnnnnnnnnnnnnnnnnnnnnnnnnnnnnnnnnnnnnnnnnnnnnnnnnnnnnnnnnnnnnnnnnnnnnnnnnnnnnnnnnnnnnnnnnnnnnnnnnnnnnnnnnnnnnnnnnnnnnnnnnnnnnnnnnnnnnnnnnnnnnnnnnnnnnnnnnnnnnnnnnnnnnnnnnnnnnnnnnnnnnnnnnnnnnnnnnnnnnnnnnnnnnnnnnnnnnnnnnnnnnnnnnnnnnnnnnnnnnnnnnnnnnnnnnnnnnnnnnnnnnnnnnnnnnnnnnnnnnnnnnnnnnnnnnnnnnnnnnnnnnnnnnnnnnnnnnnnnnnnnnnnnnnnnnnnnnnnnnnnnnnnnnnnnnnnnnnnnnnnnnnnnnnnnnnnnnnnnnnnnnnnnnnnnnnnnnnnnnnnnnnnnnnnnnnnnnnnnnnnnnnnnnnnnnnnnnnnnnnnnnnnnnnnnnnnnnnnnnnnnnnnnnnnnnnnnnnnnnnnnnnnnnnnnnnnnnnnnnnnnnnnnnnnnnnnnnnnnnnnnnnnnnnnnnnnnnnnnnnnnnnnnnnnnnnnnnnnnnnnnnnnnnnnnnnnnnnnnnnnnnnnnnnnnnnnnnnnnnnnnnnnnnnnnnnnnnnnnnnnnnnnnnnnnnnnnnnnnnnnnnnnnnnnnnnnnnnnnnnnnnnnnnnnnnnnnnnnnnnnnnnnnnnnnnnnnnnnnnnnnnnnnnnnnnnnnnnnnnnnnnnnnnnnnnnnnnnnnnnnnnnnnnnnnnnnnnnnnnnnnnnnnnnnnnnnnnnnnnnnnnnnnnnnnnnnnnnnnnnnnnnnnnnnnnnnnnnnnnnnnnnnnnnnnnnnnnnnnnnnnnnnnnnnnnnnnnnnnnnnnnnnnnnnnnnnnnnnnnnnnnnnnnnnnnnnnnnnnnnnnnnnnnnnnnnnnnnnnnnnnnnnnnnnnnnnnnnnnnnnnnnnnnnnnnnnnnnnnnnnnnnnnnnnnnnnnnnnnnnnnnnnnnnnnnnnnnnnnnnnnnnnnnnnnnnnnnnnnnnnnnnnnnnnnnnnnnnnnnnnnnnnnnnnnnnnnnnnnnnnnnnnnnnnnnnnnnnnnnnnnnnnnnnnnnnnnnnnnnnnnnnnnnnnnnnnnnnnnnnnnnnnnnnnnnnnnnnnnnnnnnnnnnnnnnnnnnnnnnnnnnnnnnnnnnnnnnnnnnnnnnnnnnnnnnnnnnnnnnnnnnnnnnnnnnnnnnnnnnnnnnnnnnnnnnnnnnnnnnnnnnnnnnnnnnnnnnnnnnnnnnnnnnnnnnnnnnnnnnnnnnnnnnnnnnnnnnnnnnnnnnnnnnnnnnnnnnnnnnnnnnnnnnnnnnnnnnnnnnnnnnnnnnnnnnnnnnnnnnnnnnnnnnnnnnnnnnnnnnnnnnnnnnnnnnnnnnnnnnnnnnnnnnnnnnnnnnnnnnnnnnnnnnnnnnnnnnnnnnnnnnnnnnnnnnnnnnnnnnnnnnnnnnnnnnnnnnnnnnnnnnnnnnnnnnnnnnnnnnnnnnnnnnnnnnnnnnnnnnnnnnnnnnnnnnnnnnnnnnnnnnnnnnnnnnnnnnnnnnnnnnnnnnnnnnnnnnnnnnnnnnnnnnnnnnnnnnnnnnnnnnnnnnnnnnnnnnnnnnnnnnnnnnnnnnnnnnnnnnnnnnnnnnnnnnnnnnnnnnnnnnnnnnnnnnnnnnnnnnnnnnnnnnnnnnnnnnnnnnnnnnnnnnnnnnnnnnnnnnnnnnnnnnnnnnnnnnnnnnnnnnnnnnnnnnnnnnnnnnnnnnnnnnnnnnnnnnnnnnnnnnnnnnnnnnnnnnnnnnnnnnnnnnnnnnnnnnnnnnnnnnnnnnnnnnnnnnnnnnnnnnnnnnnnnnnnnnnnnnnnnnnnnnnnnnnnnnnnnnnnnnnnnnnnnnnnnnnnnnnnnnnnnnnnnnnnnnnnnnnnnnnnnnnnnnnnnnnnnnnnnnnnnnnnnnnnnnnnnnnnnnnnnnnnnnnnnnnnnnnnnnnnnnnnnnnnnnnnnnnnnnnnnnnnnnnnnnnnnnnnnnnnnnnnnnnnnnnnnnnnnnnnnnnnnnnnnnnnnnnnnnnnnnnnnnnnnnnnnnnnnnnnnnnnnnnnnnnnnnnnnnnnnnnnnnnnnnnnnnnnnnnnnnnnnnnnnnnnnnnnnnnnnnnnnnnnnnnnnnnnnnnnnnnnnnnnnnnnnnnnnnnnnnnnnnnnnnnnnnnnnnnnnnnnnnnnnnnnnnnnnnnnnnnnnnnnnnnnnnnnnnnnnnnnnnnnnnnnnnnnnnnnnnnnnnnnnnnnnnnnnnnnnnnnnnnnnnnnnnnnnnnnnnnnnnnnnnnnnnnnnnnnnnnnnnnnnnnnnnnnnnnnnnnnnnnnnnnnnnnnnnnnnnnnnnnnnnnnnnnnnnnnnnnnnnnnnnnnnnnnnnnnnnnnnnnnnnnnnnnnnnnnnnnnnnnnnnnnnnnnnnnnnnnnnnnnnnnnnnnnnnnnnnnnnnnnnnnnnnnnnnnnnnnnnnnnnnnnnnnnnnnnnnnnnnnnnnnnnnnnnnnnnnnnnnnnnnnnnnnnnnnnnnnnnnnnnnnnnnnnnnnnnnnnnnnnnnnnnnnnnnnnnnnnnnnnnnnnnnnnnnnnnnnnnnnnnnnnnnnnnnnnnnnnnnnnnnnnnnnnnnnnnnnnnnnnnnnnnnnnnnnnnnnnnnnnnnnnnnnnnnnnnnnnnnnnnnnnnnnnnnnnnnnnnnnnnnnnnnnnnnnnnnnnnnnnnnnnnnnnnnnnnnnnnnnnnnnnnnnnnnnnnnnnnnnnnnnnnnnnnnnnnnnnnnnnnnnnnnnnnnnnnnnnnnnnnnnnnnnnnnnnnnnnnnnnnnnnnnnnnnnnnnnnnnnnnnnnnnnnnnnnnnnnnnnnnnnnnnnnnnnnnnnnnnnnnnnnnnnnnnnnnnnnnnnnnnnnnnnnnnnnnnnnnnnnnnnnnnnnnnnnnnnnnnnnnnnnnnnnnnnnnnnnnnnnnnnnnnnnnnnnnnnnnnnnnnnnnnnnnnnnnnnnnnnnnnnnnnnnnnnnnnnnnnnnnnnnnnnnnnnnnnnnnnnnnnnnnnnnnnnnnnnnnnnnnnnnnnnnnnnnnnnnnnnnnnnnnnnnnnnnnnnnnnnnnnnnnnnnnnnnnnnnnnnnnnnnnnnnnnnnnnnnnnnnnnnnnnnnnnnnnnnnnnnnnnnnnnnnnnnnnnnnnnnnnnnnnnnnnnnnnnnnnnnnnnnnnnnnnnnnnnnnnnnnnnnnnnnnnnnnnnnnnnnnnnnnnnnnnnnnnnnnnnnnnnnnnnnnnnnnnnnnnnnnnnnnnnnnnnnnnnnnnnnnnnnnnnnnnnnnnnnnnnnnnnnnnnnnnnnnnnnnnnnnnnnnnnnnnnnnnnnnnnnnnnnnnnnnnnnnnnnnnnnnnnnnnnnnnnnnnnnnnnnnnnnnnnnnnnnnnnnnnnnnnnnnnnnnnnnnnnnnnnnnnnnnnnnnnnnnnnnnnnnnnnnnnnnnnnnnnnnnnnnnnnnnnnnnnnnnnnnnnnnnnnnnnnnnnnnnnnnnnnnnnnnnnnnnnnnnnnnnnnnnnnnnnnnnnnnnnnnnnnnnnnnnnnnnnnnnnnnnnnnnnnnnnnnnnnnnnnnnnnnnnnnnnnnnnnnnnnnnnnnnnnnnnnnnnnnnnnnnnnnnnnnnnnnnnnnnnnnnnnnnnnnnnnnnnnnnnnnnnnnnnnnnnnnnnnnnnnnnnnnnnnnnnnnnnnnnnnnnnnnnnnnnnnnnnnnnnnnnnnnnnnnnnnnnnnnnnnnnnnnnnnnnnnnnnnnnnnnnnnnnnnnnnnnnnnnnnnnnnnnnnnnnnnnnnnnnnnnnnnnnnnnnnnnnnnnnnnnnnnnnnnnnnnnnnnnnnnnnnnnnnnnnnnnnnnnnnnnnnnnnnnnnnnnnnnnnnnnnnnnnnnnnnnnnnnnnnnnnnnnnnnnnnnnnnnnnnnnnnnnnnnnnnnnnnnnnnnnnnnnnnnnnnnnnnnnnnnnnnnnnnnnnnnnnnnnnnnnnnnnnnnnnnnnnnnnnnnnnnnnnnnnnnnnnnnnnnnnnnnnnnnnnnnnnnnnnnnnnnnnnnnnnnnnnnnnnnnnnnnnnnnnnnnnnnnnnnnnnnnnnnnnnnnnnnnnnnnnnnnnnnnnnnnnnnnnnnnnnnnnnnnnnnnnnnnnnnnnnnnnnnnnnnnnnnnnnnnnnnnnnnnnnnnnnnnnnnnnnnnnnnnnnnnnnnnnnnnnnnnnnnnnnnnnnnnnnnnnnnnnnnnnnnnnnnnnnnnnnnnnnnnnnnnnnnnnnnnnnnnnnnnnnnnnnnnnnnnnnnnnnnnnnnnnnnnnnnnnnnnnnnnnnnnnnnnnnnnnnnnnnnnnnnnnnnnnnnnnnnnnnnnnnnnnnnnnnnnnnnnnnnnnnnnnnnnnnnnnnnnnnnnnnnnnnnnnnnnnnnnnnnnnnnnnnnnnnnnnnnnnnnnnnnnnnnnnnnnnnnnnnnnnnnnnnnnnnnnnnnnnnnnnnnnnnnnnnnnnnnnnnnnnnnnnnnnnnnnnnnnnnnnnnnnnnnnnnnnnnnnnnnnnnnnnnnnnnnnnnnnnnnnnnnnnnnnnnnnnnnnnnnnnnnnnnnnnnnnnnnnnnnnnnnnnnnnnnnnnnnnnnnnnnnnnnnnnnnnnnnnnnnnnnnnnnnnnnnnnnnnnnnnnnnnnnnnnnnnnnnnnnnnnnnnnnnnnnnnnnnnnnnnnnnnnnnnnnnnnnnnnnnnnnnnnnnnnnnnnnnnnnnnnnnnnnnnnnnnnnnnnnnnnnnnnnnnnnnnnnnnnnnnnnnnnnnnnnnnnnnnnnnnnnnnnnnnnnnnnnnnnnnnnnnnnnnnnnnnnnnnnnnnnnnnnnnnnnnnnnnnnnnnnnnnnnnnnnnnnnnnnnnnnnnnnnnnnnnnnnnnnnnnnnnnnnnnnnnnnnnnnnnnnnnnnnnnnnnnnnnnnnnnnnnnnnnnnnnnnnnnnnnnnnnnnnnnnnnnnnnnnnnnnnnnnnnnnnnnnnnnnnnnnnnnnnnnnnnnnnnnnnnnnnnnnnnnnnnnnnnnnnnnnnnnnnnnnnnnnnnnnnnnnnnnnnnnnnnnnnnnnnnnnnnnnnnnnnnnnnnnnnnnnnnnnnnnnnnnnnnnnnnnnnnnnnnnnnnnnnnnnnnnnnnnnnnnnnnnnnnnnnnnnnnnnnnnnnnnnnnnnnnnnnnnnnnnnnnnnnnnnnnnnnnnnnnnnnnnnnnnnnnnnnnnnnnnnnnnnnnnnnnnnnnnnnnnnnnnnnnnnnnnnnnnnnnnnnnnnnnnnnnnnnnnnnnnnnnnnnnnnnnnnnnnnnnnnnnnnnnnnnnnnnnnnnnnnnnnnnnnnnnnnnnnnnnnnnnnnnnnnnnnnnnnnnnnnnnnnnnnnnnnnnnnnnnnnnnnnnnnnnnnnnnnnnnnnnnnnnnnnnnnnnnnnnnnnnnnnnnnnnnnnnnnnnnnnnnnnnnnnnnnnnnnnnnnnnnnnnnnnnnnnnnnnnnnnnnnnnnnnnnnnnnnnnnnnnnnnnnnnnnnnnnnnnnnnnnnnnnnnnnnnnnnnnnnnnnnnnnnnnnnnnnnnnnnnnnnnnnnnnnnnnnnnnnnnnnnnnnnnnnnnnnnnnnnnnnnnnnnnnnnnnnnnnnnnnnnnnnnnnnnnnnnnnnnnnnnnnnnnnnnnnnnnnnnnnnnnnnnnnnnnnnnnnnnnnnnnnnnnnnnnnnnnnnnnnnnnnnnnnnnnnnnnnnnnnnnnnnnnnnnnnnnnnnnnnnnnnnnnnnnnnnnnnnnnnnnnnnnnnnnnnnnnnnnnnnnnnnnnnnnnnnnnnnnnnnnnnnnnnnnnnnnnnnnnnnnnnnnnnnnnnnnnnnnnnnnnnnnnnnnnnnnnnnnnnnnnnnnnnnnnnnnnnnnnnnnnnnnnnnnnnnnnnnnnnnnnnnnnnnnnnnnnnnnnnnnnnnnnnnnnnnnnnnnnnnnnnnnnnnnnnnnnnnnnnnnnnnnnnnnnnnnnnnnnnnnnnnnnnnnnnnnnnnnnnnnnnnnnnnnnnnnnnnnnnnnnnnnnnnnnnnnnnnnnnnnnnnnnnnnnnnnnnnnnnnnnnnnnnnnnnnnnnnnnnnnnnnnnnnnnnnnnnnnnnnnnnnnnnnnnnnnnnnnnnnnnnnnnnnnnnnnnnnnnnnnnnnnnnnnnnnnnnnnnnnnnnnnnnnnnnnnnnnnnnnnnnnnnnnnnnnnnnnnnnnnnnnnnnnnnnnnnnnnnnnnnnnnnnnnnnnnnnnnnnnnnnnnnnnnnnnnnnnnnnnnnnnnnnnnnnnnnnnnnnnnnnnnnnnnnnnnnnnnnnnnnnnnnnnnnnnnnnnnnnnnnnnnnnnnnnnnnnnnnnnnnnnnnnnnnnnnnnnnnnnnnnnnnnnnnnnnnnnnnnnnnnnnnnnnnnnnnnnnnnnnnnnnnnnnnnnnnnnnnnnnnnnnnnnnnnnnnnnnnnnnnnnnnnnnnnnnnnnnnnnnnnnnnnnnnnnnnnnnnnnnnnnnnnnnnnnnnnnnnnnnnnnnnnnnnnnnnnnnnnnnnnnnnnnnnnnnnnnnnnnnnnnnnnnnnnnnnnnnnnnnnnnnnnnnnnnnnnnnnnnnnnnnnnnnnnnnnnnnnnnnnnnnnnnnnnnnnnnnnnnnnnnnnnnnnnnnnnnnnnnnnnnnnnnnnnnnnnnnnnnnnnnnnnnnnnnnnnnnnnnnnnnnnnnnnnnnnnnnnnnnnnnnnnnnnnnnnnnnnnnnnnnnnnnnnnnnnnnnnnnnnnnnnnnnnnnnnnnnnnnnnnnnnnnnnnnnnnnnnnnnnnnnnnnnnnnnnnnnnnnnnnnnnnnnnnnnnnnnnnnnnnnnnnnnnnnnnnnnnnnnnnnnnnnnnnnnnnnnnnnnnnnnnnnnnnnnnnnnnnnnnnnnnnnnnnnnnnnnnnnnnnnnnnnnnnnnnnnnnnnnnnnnnnnnnnnnnnnnnnnnnnnnnnnnnnnnnnnnnnnnnnnnnnnnnnnnnnnnnnnnnnnnnnnnnnnnnnnnnnnnnnnnnnnnnnnnnnnnnnnnnnnnnnnnnnnnnnnnnnnnnnnnnnnnnnnnnnnnnnnnnnnnnnnnnnnnnnnnnnnnnnnnnnnnnnnnnnnnnnnnnnnnnnnnnnnnnnnnnnnnnnnnnnnnnnnnnnnnnnnnnnnnnnnnnnnnnnnnnnnnnnnnnnnnnnnnnnnnnnnnnnnnnnnnnnnnnnnnnnnnnnnnnnnnnnnnnnnnnnnnnnnnnnnnnnnnnnnnnnnnnnnnnnnnnnnnnnnnnnnnnnnnnnnnnnnnnnnnnnnnnnnnnnnnnnnnnnnnnnnnnnnnnnnnnnnnnnnnnnnnnnnnnnnnnnnnnnnnnnnnnnnnnnnnnnnnnnnnnnnnnnnnnnnnnnnnnnnnnnnnnnnnnnnnnnnnnnnnnnnnnnnnnnnnnnnnnnnnnnnnnnnnnnnnnnnnnnnnnnnnnnnnnnnnnnnnnnnnnnnnnnnnnnnnnnnnnnnnnnnnnnnnnnnnnnnnnnnnnnnnnnnnnnnnnnnnnnnnnnnnnnnnnnnnnnnnnnnnnnnnnnnnnnnnnnnnnnnnnnnnnnnnnnnnnnnnnnnnnnnnnnnnnnnnnnnnnnnnnnnnnnnnnnnnnnnnnnnnnnnnnnnnnnnnnnnnnnnnnnnnnnnnnnnnnnnnnnnnnnnnnnnnnnnnnnnnnnnnnnnnnnnnnnnnnnnnnnnnnnnnnnnnnnnnnnnnnnnnnnnnnnnnnnnnnnnnnnnnnnnnnnnnnnnnnnnnnnnnnnnnnnnnnnnnnnnnnnnnnnnnnnnnnnnnnnnnnnnnnnnnnnnnnnnnnnnnnnnnnnnnnnnnnnnnnnnnnnnnnnnnnnnnnnnnnnnnnnnnnnnnnnnnnnnnnnnnnnnnnnnnnnnnnnnnnnnnnnnnnnnnnnnnnnnnnnnnnnnnnnnnnnnnnnnnnnnnnnnnnnnnnnnnnnnnnnnnnnnnnnnnnnnnnnnnnnnnnnnnnnnnnnnnnnnnnnnnnnnnnnnnnnnnnnnnnnnnnnnnnnnnnnnnnnnnnnnnnnnnnnnnnnnnnnnnnnnnnnnnnnnnnnnnnnnnnnnnnnnnnnnnnnnnnnnnnnnnnnnnnnnnnnnnnnnnnnnnnnnnnnnnnnnnnnnnnnnnnnnnnnnnnnnnnnnnnnnnnnnnnnnnnnnnnnnnnnnnnnnnnnnnnnnnnnnnnnnnnnnnnnnnnnnnnnnnnnnnnnnnnnnnnnnnnnnnnnnnnnnnnnnnnnnnnnnnnnnnnnnnnnnnnnnnnnnnnnnnnnnnnnnnnnnnnnnnnnnnnnnnnnnnnnnnnnnnnnnnnnnnnnnnnnnnnnnnnnnnnnnnnnnnnnnnnnnnnnnnnnnnnnnnnnnnnnnnnnnnnnnnnnnnnnnnnnnnnnnnnnnnnnnnnnnnnnnnnnnnnnnnnnnnnnnnnnnnnnnnnnnnnnnnnnnnnnnnnnnnnnnnnnnnnnnnnnnnnnnnnnnnnnnnnnnnnnnnnnnnnnnnnnnnnnnnnnnnnnnnnnnnnnnnnnnnnnnnnnnnnnnnnnnnnnnnnnnnnnnnnnnnnnnnnnnnnnnnnnnnnnnnnnnnnnnnnnnnnnnnnnnnnnnnnnnnnnnnnnnnnnnnnnnnnnnnnnnnnnnnnnnnnnnnnnnnnnnnnnnnnnnnnnnnnnnnnnnnnnnnnnnnnnnnnnnnnnnnnnnnnnnnnnnnnnnnnnnnnnnnnnnnnnnnnnnnnnnnnnnnnnnnnnnnnnnnnnnnnnnnnnnnnnnnnnnnnnnnnnnnnnnnnnnnnnnnnnnnnnnnnnnnnnnnnnnnnnnnnnnnnnnnnnnnnnnnnnnnnnnnnnnnnnnnnnnnnnnnnnnnnnnnnnnnnnnnnnnnnnnnnnnnnnnnnnnnnnnnnnnnnnnnnnnnnnnnnnnnnnnnnnnnnnnnnnnnnnnnnnnnnnnnnnnnnnnnnnnnnnnnnnnnnnnnnnnnnnnnnnnnnnnnnnnnnnnnnnnnnnnnnnnnnnnnnnnnnnnnnnnnnnnnnnnnnnnnnnnnnnnnnnnnnnnnnnnnnnnnnnnnnnnnnnnnnnnnnnnnnnnnnnnnnnnnnnnnnnnnnnnnnnnnnnnnnnnnnnnnnnnnnnnnnnnnnnnnnnnnnnnnnnnnnnnnnnnnnnnnnnnnnnnnnnnnnnnnnnnnnnnnnnnnnnnnnnnnnnnnnnnnnnnnnnnnnnnnnnnnnnnnnnnnnnnnnnnnnnnnnnnnnnnnnnnnnnnnnnnnnnnnnnnnnnnnnnnnnnnnnnnnnnnnnnnnnnnnnnnnnnnnnnnnnnnnnnnnnnnnnnnnnnnnnnnnnnnnnnnnnnnnnnnnnnnnnnnnnnnnnnnnnnnnnnnnnnnnnnnnnnnnnnnnnnnnnnnnnnnnnnnnnnnnnnnnnnnnnnnnnnnnnnnnnnnnnnnnnnnnnnnnnnnnnnnnnnnnnnnnnnnnnnnnnnnnnnnnnnnnnnnnnnnnnnnnnnnnnnnnnnnnnnnnnnnnnnnnnnnnnnnnnnnnnnnnnnnnnnnnnnnnnnnnnnnnnnnnnnnnnnnnnnnnnnnnnnnnnnnnnnnnnnnnnnnnnnnnnnnnnnnnnnnnnnnnnnnnnnnnnnnnnnnnnnnnnnnnnnnnnnnnnnnnnnnnnnnnnnnnnnnnnnnnnnnnnnnnnnnnnnnnnnnnnnnnnnnnnnnnnnnnnnnnnnnnnnnnnnnnnnnnnnnnnnnnnnnnnnnnnnnnnnnnnnnnnnnnnnnnnnnnnnnnnnnnnnnnnnnnnnnnnnnnnnnnnnnnnnnnnnnnnnnnnnnnnnnnnnnnnnnnnnnnnnnnnnnnnnnnnnnnnnnnnnnnnnnnnnnnnnnnnnnnnnnnnnnnnnnnnnnnnnnnnnnnnnnnnnnnnnnnnnnnnnnnnnnnnnnnnnnnnnnnnnnnnnnnnnnnnnnnnnnnnnnnnnnnnnnnnnnnnnnnnnnnnnnnnnnnnnnnnnnnnnnnnnnnnnnnnnnnnnnnnnnnnnnnnnnnnnnnnnnnnnnnnnnnnnnnnnnnnnnnnnnnnnnnnnnnnnnnnnnnnnnnnnnnnnnnnnnnnnnnnnnnnnnnnnnnnnnnnnnnnnnnnnnnnnnnnnnnnnnnnnnnnnnnnnnnnnnnnnnnnnnnnnnnnnnnnnnnnnnnnnnnnnnnnnnnnnnnnnnnnnnnnnnnnnnnnnnnnnnnnnnnnnnnnnnnnnnnnnnnnnnnnnnnnnnnnnnnnnnnnnnnnnnnnnnnnnnnnnnnnnnnnnnnnnnnnnnnnnnnnnnnnnnnnnnnnnnnnnnnnnnnnnnnnnnnnnnnnnnnnnnnnnnnnnnnnnnnnnnnnnnnnnnnnnnnnnnnnnnnnnnnnnnnnnnnnnnnnnnnnnnnnnnnnnnnnnnnnnnnnnnnnnnnnnnnnnnnnnnnnnnnnnnnnnnnnnnnnnnnnnnnnnnnnnnnnnnnnnnnnnnnnnnnnnnnnnnnnnnnnnnnnnnnnnnnnnnnnnnnnnnnnnnnnnnnnnnnnnnnnnnnnnnnnnnnnnnnnnnnnnnnnnnnnnnnnnnnnnnnnnnnnnnnnnnnnnnnnnnnnnnnnnnnnnnnnnnnnnnnnnnnnnnnnnnnnnnnnnnnnnnnnnnnnnnnnnnnnnnnnnnnnnnnnnnnnnnnnnnnnnnnnnnnnnnnnnnnnnnnnnnnnnnnnnnnnnnnnnnnnnnnnnnnnnnnnnnnnnnnnnnnnnnnnnnnnnnnnnnnnnnnnnnnnnnnnnnnnnnnnnnnnnnnnnnnnnnnnnnnnnnnnnnnnnnnnnnnnnnnnnnnnnnnnnnnnnnnnnnnnnnnnnnnnnnnnnnnnnnnnnnnnnnnnnnnnnnnnnnnnnnnnnnnnnnnnnnnnnnnnnnnnnnnnnnnnnnnnnnnnnnnnnnnnnnnnnnnnnnnnnnnnnnnnnnnnnnnnnnnnnnnnnnnnnnnnnnnnnnnnnnnnnnnnnnnnnnnnnnnnnnnnnnnnnnnnnnnnnnnnnnnnnnnnnnnnnnnnnnnnnnnnnnnnnnnnnnnnnnnnnnnnnnnnnnnnnnnnnnnnnnnnnnnnnnnnnnnnnnnnnnnnnnnnnnnnnnnnnnnnnnnnnnnnnnnnnnnnnnnnnnnnnnnnnnnnnnnnnnnnnnnnnnnnnnnnnnnnnnnnnnnnnnnnnnnnnnnnnnnnnnnnnnnnnnnnnnnnnnnnnnnnnnnnnnnnnnnnnnnnnnnnnnnnnnnnnnnnnnnnnnnnnnnnnnnnnnnnnnnnnnnnnnnnnnnnnnnnnnnnnnnnnnnnnnnnnnnnnnnnnnnnnnnnnnnnnnnnnnnnnnnnnnnnnnnnnnnnnnnnnnnnnnnnnnnnnnnnnnnnnnnnnnnnnnnnnnnnnnnnnnnnnnnnnnnnnnnnnnnnnnnnnnnnnnnnnnnnnnnnnnnnnnnnnnnnnnnnnnnnnnnnnnnnnnnnnnnnnnnnnnnnnnnnnnnnnnnnnnnnnnnnnnnnnnnnnnnnnnnnnnnnnnnnnnnnnnnnnnnnnnnnnnnnnnnnnnnnnnnnnnnnnnnnnnnnnnnnnnnnnnnnnnnnnnnnnnnnnnnnnnnnnnnnnnnnnnnnnnnnnnnnnnnnnnnnnnnnnnnnnnnnnnnnnnnnnnnnnnnnnnnnnnnnnnnnnnnnnnnnnnnnnnnnnnnnnnnnnnnnnnnnnnnnnnnnnnnnnnnnnnnnnnnnnnnnnnnnnnnnnnnnnnnnnnnnnnnnnnnnnnnnnnnnnnnnnnnnnnnnnnnnnnnnnnnnnnnnnnnnnnnnnnnnnnnnnnnnnnnnnnnnnnnnnnnnnnnnnnnnnnnnnnnnnnnnnnnnnnnnnnnnnnnnnnnnnnnnnnnnnnnnnnnnnnnnnnnnnnnnnnnnnnnnnnnnnnnnnnnnnnnnnnnnnnnnnnnnnnnnnnnnnnnnnnnnnnnnnnnnnnnnnnnnnnnnnnnnnnnnnnnnnnnnnnnnnnnnnnnnnnnnnnnnnnnnnnnnnnnnnnnnnnnnnnnnnnnnnnnnnnnnnnnnnnnnnnnnnnnnnnnnnnnnnnnnnnnnnnnnnnnnnnnnnnnnnnnnnnnnnnnnnnnnnnnnnnnnnnnnnnnnnnnnnnnnnnnnnnnnnnnnnnnnnnnnnnnnnnnnnnnnnnnnnnnnnnnnnnnnnnnnnnnnnnnnnnnnnnnnnnnnnnnnnnnnnnnnnnnnnnnnnnnnnnnnnnnnnnnnnnnnnnnnnnnnnnnnnnnnnnnnnnnnnnnnnnnnnnnnnnnnnnnnnnnnnnnnnnnnnnnnnnnnnnnnnnnnnnnnnnnnnnnnnnnnnnnnnnnnnnnnnnnnnnnnnnnnnnnnnnnnnnnnnnnnnnnnnnnnnnnnnnnnnnnnnnnnnnnnnnnnnnnnnnnnnnnnnnnnnnnnnnnnnnnnnnnnnnnnnnnnnnnnnnnnnnnnnnnnnnnnnnnnnnnnnnnnnnnnnnnnnnnnnnnnnnnnnnnnnnnnnnnnnnnnnnnnnnnnnnnnnnnnnnnnnnnnnnnnnnnnnnnnnnnnnnnnnnnnnnnnnnnnnnnnnnnnnnnnnnnnnnnnnnnnnnnnnnnnnnnnnnnnnnnnnnnnnnnnnnnnnnnnnnnnnnnnnnnnnnnnnnnnnnnnnnnnnnnnnnnnnnnnnnnnnnnnnnnnnnnnnnnnnnnnnnnnnnnnnnnnnnnnnnnnnnnnnnnnnnnnnnnnnnnnnnnnnnnnnnnnnnnnnnnnnnnnnnnnnnnnnnnnnnnnnnnnnnnnnnnnnnnnnnnnnnnnnnnnnnnnnnnnnnnnnnnnnnnnnnnnnnnnnnnnnnnnnnnnnnnnnnnnnnnnnnnnnnnnnnnnnnnnnnnnnnnnnnnnnnnnnnnnnnnnnnnnnnnnnnnnnnnnnnnnnnnnnnnnnnnnnnnnnnnnnnnnnnnnnnnnnnnnnnnnnnnnnnnnnnnnnnnnnnnnnnnnnnnnnnnnnnnnnnnnnnnnnnnnnnnnnnnnnnnnnnnnnnnnnnnnnnnnnnnnnnnnnnnnnnnnnnnnnnnnnnnnnnnnnnnnnnnnnnnnnnnnnnnnnnnnnnnnnnnnnnnnnnnnnnnnnnnnnnnnnnnnnnnnnnnnnnnnnnnnnnnnnnnnnnnnnnnnnnnnnnnnnnnnnnnnnnnnnnnnnnnnnnnnnnnnnnnnnnnnnnnnnnnnnnnnnnnnnnnnnnnnnnnnnnnnnnnnnnnnnnnnnnnnnnnnnnnnnnnnnnnnnnnnnnnnnnnnnnnnnnnnnnnnnnnnnnnnnnnnnnnnnnnnnnnnnnnnnnnnnnnnnnnnnnnnnnnnnnnnnnnnnnnnnnnnnnnnnnnnnnnnnnnnnnnnnnnnnnnnnnnnnnnnnnnnnnnnnnnnnnnnnnnnnnnnnnnnnnnnnnnnnnnnnnnnnnnnnnnnnnnnnnnnnnnnnnnnnnnnnnnnnnnnnnnnnnnnnnnnnnnnnnnnnnnnnnnnnnnnnnnnnnnnnnnnnnnnnnnnnnnnnnnnnnnnnnnnnnnnnnnnnnnnnnnnnnnnnnnnnnnnnnnnnnnnnnnnnnnnnnnnnnnnnnnnnnnnnnnnnnnnnnnnnnnnnnnnnnnnnnnnnnnnnnnnnnnnnnnnnnnnnnnnnnnnnnnnnnnnnnnnnnnnnnnnnnnnnnnnnnnnnnnnnnnnnnnnnnnnnnnnnnnnnnnnnnnnnnnnnnnnnnnnnnnnnnnnnnnnnnnnnnnnnnnnnnnnnnnnnnnnnnnnnnnnnnnnnnnnnnnnnnnnnnnnnnnnnnnnnnnnnnnnnnnnnnnnnnnnnnnnnnnnnnnnnnnnnnnnnnnnnnnnnnnnnnnnnnnnnnnnnnnnnnnnnnnnnnnnnnnnnnnnnnnnnnnnnnnnnnnnnnnnnnnnnnnnnnnnnnnnnnnnnnnnnnnnnnnnnnnnnnnnnnnnnnnnnnnnnnnnnnnnnnnnnnnnnnnnnnnnnnnnnnnnnnnnnnnnnnnnnnnnnnnnnnnnnnnnnnnnnnnnnnnnnnnnnnnnnnnnnnnnnnnnnnnnnnnnnnnnnnnnnnnnnnnnnnnnnnnnnnnnnnnnnnnnnnnnnnnnnnnnnnnnnnnnnnnnnnnnnnnnnnnnnnnnnnnnnnnnnnnnnnnnnnnnnnnnnnnnnnnnnnnnnnnnnnnnnnnnnnnnnnnnnnnnnnnnnnnnnnnnnnnnnnnnnnnnnnnnnnnnnnnnnnnnnnnnnnnnnnnnnnnnnnnnnnnnnnnnnnnnnnnnnnnnnnnnnnnnnnnnnnnnnnnnnnnnnnnnnnnnnnnnnnnnnnnnnnnnnnnnnnnnnnnnnnnnnnnnnnnnnnnnnnnnnnnnnnnnnnnnnnnnnnnnnnnnnnnnnnnnnnnnnnnnnnnnnnnnnnnnnnnnnnnnnnnnnnnnnnnnnnnnnnnnnnnnnnnnnnnnnnnnnnnnnnnnnnnnnnnnnnnnnnnnnnnnnnnnnnnnnnnnnnnnnnnnnnnnnnnnnnnnnnnnnnnnnnnnnnnnnnnnnnnnnnnnnnnnnnnnnnnnnnnnnnnnnnnnnnnnnnnnnnnnnnnnnnnnnnnnnnnnnnnnnnnnnnnnnnnnnnnnnnnnnnnnnnnnnnnnnnnnnnnnnnnnnnnnnnnnnnnnnnnnnnnnnnnnnnnnnnnnnnnnnnnnnnnnnnnnnnnnnnnnnnnnnnnnnnnnnnnnnnnnnnnnnnnnnnnnnnnnnnnnnnnnnnnnnnnnnnnnnnnnnnnnnnnnnnnnnnnnnnnnnnnnnnnnnnnnnnnnnnnnnnnnnnnnnnnnnnnnnnnnnnnnnnnnnnnnnnnnnnnnnnnnnnnnnnnnnnnnnnnnnnnnnnnnnnnnnnnnnnnnnnnnnnnnnnnnnnnnnnnnnnnnnnnnnnnnnnnnnnnnnnnnnnnnnnnnnnnnnnnnnnnnnnnnnnnnnnnnnnnnnnnnnnnnnnnnnnnnnnnnnnnnnnnnnnnnnnnnnnnnnnnnnnnnnnnnnnnnnnnnnnnnnnnnnnnnnnnnnnnnnnnnnnnnnnnnnnnnnnnnnnnnnnnnnnnnnnnnnnnnnnnnnnnnnnnnnnnnnnnnnnnnnnnnnnnnnnnnnnnnnnnnnnnnnnnnnnnnnnnnnnnnnnnnnnnnnnnnnnnnnnnnnnnnnnnnnnnnnnnnnnnnnnnnnnnnnnnnnnnnnnnnnnnnnnnnnnnnnnnnnnnnnnnnnnnnnnnnnnnnnnnnnnnnnnnnnnnnnnnnnnnnnnnnnnnnnnnnnnnnnnnnnnnnnnnnnnnnnnnnnnnnnnnnnnnnnnnnnnnnnnnnnnnnnnnnnnnnnnnnnnnnnnnnnnnnnnnnnnnnnnnnnnnnnnnnnnnnnnnnnnnnnnnnnnnnnnnnnnnnnnnnnnnnnnnnnnnnnnnnnnnnnnnnnnnnnnnnnnnnnnnnnnnnnnnnnnnnnnnnnnnnnnnnnnnnnnnnnnnnnnnnnnnnnnnnnnnnnnnnnnnnnnnnnnnnnnnnnnnnnnnnnnnnnnnnnnnnnnnnnnnnnnnnnnnnnnnnnnnnnnnnnnnnnnnnnnnnnnnnnnnnnnnnnnnnnnnnnnnnnnnnnnnnnnnnnnnnnnnnnnnnnnnnnnnnnnnnnnnnnnnnnnnnnnnnnnnnnnnnnnnnnnnnnnnnnnnnnnnnnnnnnnnnnnnnnnnnnnnnnnnnnnnnnnnnnnnnnnnnnnnnnnnnnnnnnnnnnnnnnnnnnnnnnnnnnnnnnnnnnnnnnnnnnnnnnnnnnnnnnnnnnnnnnnnnnnnnnnnnnnnnnnnnnnnnnnnnnnnnnnnnnnnnnnnnnnnnnnnnnnnnnnnnnnnnnnnnnnnnnnnnnnnnnnnnnnnnnnnnnnnnnnnnnnnnnnnnnnnnnnnnnnnnnnnnnnnnnnnnnnnnnnnnnnnnnnnnnnnnnnnnnnnnnnnnnnnnnnnnnnnnnnnnnnnnnnnnnnnnnnnnnnnnnnnnnnnnnnnnnnnnnnnnnnnnnnnnnnnnnnnnnnnnnnnnnnnnnnnnnnnnnnnnnnnnnnnnnnnnnnnnnnnnnnnnnnnnnnnnnnnnnnnnnnnnnnnnnnnnnnnnnnnnnnnnnnnnnnnnnnnnnnnnnnnnnnnnnnnnnnnnnnnnnnnnnnnnnnnnnnnnnnnnnnnnnnnnnnnnnnnnnnnnnnnnnnnnnnnnnnnnnnnnnnnnnnnnnnnnnnnnnnnnnnnnnnnnnnnnnnnnnnnnnnnnnnnnnnnnnnnnnnnnnnnnnnnnnnnnnnnnnnnnnnnnnnnnnnnnnnnnnnnnnnnnnnnnnnnnnnnnnnnnnnnnnnnnnnnnnnnnnnnnnnnnnnnnnnnnnnnnnnnnnnnnnnnnnnnnnnnnnnnnnnnnnnnnnnnnnnnnnnnnnnnnnnnnnnnnnnnnnnnnnnnnnnnnnnnnnnnnnnnnnnnnnnnnnnnnnnnnnnnnnnnnnnnnnnnnnnnnnnnnnnnnnnnnnnnnnnnnnnnnnnnnnnnnnnnnnnnnnnnnnnnnnnnnnnnnnnnnnnnnnnnnnnnnnnnnnnnnnnnnnnnnnnnnnnnnnnnnnnnnnnnnnnnnnnnnnnnnnnnnnnnnnnnnnnnnnnnnnnnnnnnnnnnnnnnnnnnnnnnnnnnnnnnnnnnnnnnnnnnnnnnnnnnnnnnnnnnnnnnnnnnnnnnnnnnnnnnnnnnnnnnnnnnnnnnnnnnnnnnnnnnnnnnnnnnnnnnnnnnnnnnnnnnnnnnnnnnnnnnnnnnnnnnnnnnnnnnnnnnnnnnnnnnnnnnnnnnnnnnnnnnnnnnnnnnnnnnnnnnnnnnnnnnnnnnnnnnnnnnnnnnnnnnnnnnnnnnnnnnnnnnnnnnnnnnnnnnnnnnnnnnnnnnnnnnnnnnnnnnnnnnnnnnnnnnnnnnnnnnnnnnnnnnnnnnnnnnnnnnnnnnnnnnnnnnnnnnnnnnnnnnnnnnnnnnnnnnnnnnnnnnnnnnnnnnnnnnnnnnnnnnnnnnnnnnnnnnnnnnnnnnnnnnnnnnnnnnnnnnnnnnnnnnnnnnnnnnnnnnnnnnnnnnnnnnnnnnnnnnnnnnnnnnnnnnnnnnnnnnnnnnnnnnnnnnnnnnnnnnnnnnnnnnnnnnnnnnnnnnnnnnnnnnnnnnnnnnnnnnnnnnnnnnnnnnnnnnnnnnnnnnnnnnnnnnnnnnnnnnnnnnnnnnnnnnnnnnnnnnnnnnnnnnnnnnnnnnnnnnnnnnnnnnnnnnnnnnnnnnnnnnnnnnnnnnnnnnnnnnnnnnnnnnnnnnnnnnnnnnnnnnnnnnnnnnnnnnnnnnnnnnnnnnnnnnnnnnnnnnnnnnnnnnnnnnnnnnnnnnnnnnnnnnnnnnnnnnnnnnnnnnnnnnnnnnnnnnnnnnnnnnnnnnnnnnnnnnnnnnnnnnnnnnnnnnnnnnnnnnnnnnnnnnnnnnnnnnnnnnnnnnnnnnnnnnnnnnnnnnnnnnnnnnnnnnnnnnnnnnnnnnnnnnnnnnnnnnnnnnnnnnnnnnnnnnnnnnnnnnnnnnnnnnnnnnnnnnnnnnnnnnnnnnnnnnnnnnnnnnnnnnnnnnnnnnnnnnnnnnnnnnnnnnnnnnnnnnnnnnnnnnnnnnnnnnnnnnnnnnnnnnnnnnnnnnnnnnnnnnnnnnnnnnnnnnnnnnnnnnnnnnnnnnnnnnnnnnnnnnnnnnnnnnnnnnnnnnnnnnnnnnnnnnnnnnnnnnnnnnnnnnnnnnnnnnnnnnnnnnnnnnnnnnnnnnnnnnnnnnnnnnnnnnnnnnnnnnnnnnnnnnnnnnnnnnnnnnnnnnnnnnnnnnnnnnnnnnnnnnnnnnnnnnnnnnnnnnnnnnnnnnnnnnnnnnnnnnnnnnnnnnnnnnnnnnnnnnnnnnnnnnnnnnnnnnnnnnnnnnnnnnnnnnnnnnnnnnnnnnnnnnnnnnnnnnnnnnnnnnnnnnnnnnnnnnnnnnnnnnnnnnnnnnnnnnnnnnnnnnnnnnnnnnnnnnnnnnnnnnnnnnnnnnnnnnnnnnnnnnnnnnnnnnnnnnnnnnnnnnnnnnnnnnnnnnnnnnnnnnnnnnnnnnnnnnnnnnnnnnnnnnnnnnnnnnnnnnnnnnnnnnnnnnnnnnnnnnnnnnnnnnnnnnnnnnnnnnnnnnnnnnnnnnnnnnnnnnnnnnnnnnnnnnnnnnnnnnnnnnnnnnnnnnnnnnnnnnnnnnnnnnnnnnnnnnnnnnnnnnnnnnnnnnnnnnnnnnnnnnnnnnnnnnnnnnnnnnnnnnnnnnnnnnnnnnnnnnnnnnnnnnnnnnnnnnnnnnnnnnnnnnnnnnnnnnnnnnnnnnnnnnnnnnnnnnnnnnnnnnnnnnnnnnnnnnnnnnnnnnnnnnnnnnnnnnnnnnnnnnnnnnnnnnnnnnnnnnnnnnnnnnnnnnnnnnnnnnnnnnnnnnnnnnnnnnnnnnnnnnnnnnnnnnnnnnnnnnnnnnnnnnnnnnnnnnnnnnnnnnnnnnnnnnnnnnnnnnnnnnnnnnnnnnnnnnnnnnnnnnnnnnnnnnnnnnnnnnnnnnnnnnnnnnnnnnnnnnnnnnnnnnnnnnnnnnnnnnnnnnnnnnnnnnnnnnnnnnnnnnnnnnnnnnnnnnnnnnnnnnnnnnnnnnnnnnnnnnnnnnnnnnnnnnnnnnnnnnnnnnnnnnnnnnnnnnnnnnnnnnnnnnnnnnnnnnnnnnnnnnnnnnnnnnnnnnnnnnnnnnnnnnnnnnnnnnnnnnnnnnnnnnnnnnnnnnnnnnnnnnnnnnnnnnnnnnnnnnnnnnnnnnnnnnnnnnnnnnnnnnnnnnnnnnnnnnnnnnnnnnnnnnnnnnnnnnnnnnnnnnnnnnnnnnnnnnnnnnnnnnnnnnnnnnnnnnnnnnnnnnnnnnnnnnnnnnnnnnnnnnnnnnnnnnnnnnnnnnnnnnnnnnnnnnnnnnnnnnnnnnnnnnnnnnnnnnnnnnnnnnnnnnnnnnnnnnnnnnnnnnnnnnnnnnnnnnnnnnnnnnnnnnnnnnnnnnnnnnnnnnnnnnnnnnnnnnnnnnnnnnnnnnnnnnnnnnnnnnnnnnnnnnnnnnnnnnnnnnnnnnnnnnnnnnnnnnnnnnnnnnnnnnnnnnnnnnnnnnnnnnnnnnnnnnnnnnnnnnnnnnnnnnnnnnnnnnnnnnnnnnnnnnnnnnnnnnnnnnnnnnnnnnnnnnnnnnnnnnnnnnnnnnnnnnnnnnnnnnnnnnnnnnnnnnnnnnnnnnnnnnnnnnnnnnnnnnnnnnnnnnnnnnnnnnnnnnnnnnnnnnnnnnnnnnnnnnnnnnnnnnnnnnnnnnnnnnnnnnnnnnnnnnnnnnnnnnnnnnnnnnnnnnnnnnnnnnnnnnnnnnnnnnnnnnnnnnnnnnnnnnnnnnnnnnnnnnnnnnnnnnnnnnnnnnnnnnnnnnnnnnnnnnnnnnnnnnnnnnnnnnnnnnnnnnnnnnnnnnnnnnnnnnnnnnnnnnnnnnnnnnnnnnnnnnnnnnnnnnnnnnnnnnnnnnnnnnnnnnnnnnnnnnnnnnnnnnnnnnnnnnnnnnnnnnnnnnnnnnnnnnnnnnnnnnnnnnnnnnnnnnnnnnnnnnnnnnnnnnnnnnnnnnnnnnnnnnnnnnnnnnnnnnnnnnnnnnnnnnnnnnnnnnnnnnnnnnnnnnnnnnnnnnnnnnnnnnnnnnnnnnnnnnnnnnnnnnnnnnnnnnnnnnnnnnnnnnnnnnnnnnnnnnnnnnnnnnnnnnnnnnnnnnnnnnnnnnnnnnnnnnnnnnnnnnnnnnnnnnnnnnnnnnnnnnnnnnnnnnnnnnnnnnnnnnnnnnnnnnnnnnnnnnnnnnnnnnnnnnnnnnnnnnnnnnnnnnnnnnnnnnnnnnnnnnnnnnnnnnnnnnnnnnnnnnnnnnnnnnnnnnnnnnnnnnnnnnnnnnnnnnnnnnnnnnnnnnnnnnnnnnnnnnnnnnnnnnnnnnnnnnnnnnnnnnnnnnnnnnnnnnnnnnnnnnnnnnnnnnnnnnnnnnnnnnnnnnnnnnnnnnnnnnnnnnnnnnnnnnnnnnnnnnnnnnnnnnnnnnnnnnnnnnnnnnnnnnnnnnnnnnnnnnnnnnnnnnnnnnnnnnnnnnnnnnnnnnnnnnnnnnnnnnnnnnnnnnnnnnnnnnnnnnnnnnnnnnnnnnnnnnnnnnnnnnnnnnnnnnnnnnnnnnnnnnnnnnnnnnnnnnnnnnnnnnnnnnnnnnnnnnnnnnnnnnnnnnnnnnnnnnnnnnnnnnnnnnnnnnnnnnnnnnnnnnnnnnnnnnnnnnnnnnnnnnnnnnnnnnnnnnnnnnnnnnnnnnnnnnnnnnnnnnnnnnnnnnnnnnnnnnnnnnnnnnnnnnnnnnnnnnnnnnnnnnnnnnnnnnnnnnnnnnnnnnnnnnnnnnnnnnnnnnnnnnnnnnnnnnnnnnnnnnnnnnnnnnnnnnnnnnnnnnnnnnnnnnnnnnnnnnnnnnnnnnnnnnnnnnnnnnnnnnnnnnnnnnnnnnnnnnnnnnnnnnnnnnnnnnnnnnnnnnnnnnnnnnnnnnnnnnnnnnnnnnnnnnnnnnnnnnnnnnnnnnnnnnnnnnnnnnnnnnnnnnnnnnnnnnnnnnnnnnnnnnnnnnnnnnnnnnnnnnnnnnnnnnnnnnnnnnnnnnnnnnnnnnnnnnnnnnnnnnnnnnnnnnnnnnnnnnnnnnnnnnnnnnnnnnnnnnnnnnnnnnnnnnnnnnnnnnnnnnnnnnnnnnnnnnnnnnnnnnnnnnnnnnnnnnnnnnnnnnnnnnnnnnnnnnnnnnnnnnnnnnnnnnnnnnnnnnnnnnnnnnnnnnnnnnnnnnnnnnnnnnnnnnnnnnnnnnnnnnnnnnnnnnnnnnnnnnnnnnnnnnnnnnnnnnnnnnnnnnnnnnnnnnnnnnnnnnnnnnnnnnnnnnnnnnnnnnnnnnnnnnnnnnnnnnnnnnnnnnnnnnnnnnnnnnnnnnnnnnnnnnnnnnnnnnnnnnnnnnnnnnnnnnnnnnnnnnnnnnnnnnnnnnnnnnnnnnnnnnnnnnnnnnnnnnnnnnnnnnnnnnnnnnnnnnnnnnnnnnnnnnnnnnnnnnnnnnnnnnnnnnnnnnnnnnnnnnnnnnnnnnnnnnnnnnnnnnnnnnnnnnnnnnnnnnnnnnnnnnnnnnnnnnnnnnnnnnnnnnnnnnnnnnnnnnnnnnnnnnnnnnnnnnnnnnnnnnnnnnnnnnnnnnnnnnnnnnnnnnnnnnnnnnnnnnnnnnnnnnnnnnnnnnnnnnnnnnnnnnnnnnnnnnnnnnnnnnnnnnnnnnnnnnnnnnnnnnnnnnnnnnnnnnnnnnnnnnnnnnnnnnnnnnnnnnnnnnnnnnnnnnnnnnnnnnnnnnnnnnnnnnnnnnnnnnnnnnnnnnnnnnnnnnnnnnnnnnnnnnnnnnnnnnnnnnnnnnnnnnnnnnnnnnnnnnnnnnnnnnnnnnnnnnnnnnnnnnnnnnnnnnnnnnnnnnnnnnnnnnnnnnnnnnnnnnnnnnnnnnnnnnnnnnnnnnnnnnnnnnnnnnnnnnnnnnnnnnnnnnnnnnnnnnnnnnnnnnnnnnnnnnnnnnnnnnnnnnnnnnnnnnnnnnnnnnnnnnnnnnnnnnnnnnnnnnnnnnnnnnnnnnnnnnnnnnnnnnnnnnnnnnnnnnnnnnnnnnnnnnnnnnnnnnnnnnnnnnnnnnnnnnnnnnnnnnnnnnnnnnnnnnnnnnnnnnnnnnnnnnnnnnnnnnnnnnnnnnnnnnnnnnnnnnnnnnnnnnnnnnnnnnnnnnnnnnnnnnnnnnnnnnnnnnnnnnnnnnnnnnnnnnnnnnnnnnnnnnnnnnnnnnnnnnnnnnnnnnnnnnnnnnnnnnnnnnnnnnnnnnnnnnnnnnnnnnnnnnnnnnnnnnnnnnnnnnnnnnnnnnnnnnnnnnnnnnnnnnnnnnnnnnnnnnnnnnnnnnnnnnnnnnnnnnnnnnnnnnnnnnnnnnnnnnnnnnnnnnnnnnnnnnnnnnnnnnnnnnnnnnnnnnnnnnnnnnnnnnnnnnnnnnnnnnnnnnnnnnnnnnnnnnnnnnnnnnnnnnnnnnnnnnnnnnnnnnnnnnnnnnnnnnnnnnnnnnnnnnnnnnnnnnnnnnnnnnnnnnnnnnnnnnnnnnnnnnnnnnnnnnnnnnnnnnnnnnnnnnnnnnnnnnnnnnnnnnnnnnnnnnnnnnnnnnnnnnnnnnnnnnnnnnnnnnnnnnnnnnnnnnnnnnnnnnnnnnnnnnnnnnnnnnnnnnnnnnnnnnnnnnnnnnnnnnnnnnnnnnnnnnnnnnnnnnnnnnnnnnnnnnnnnnnnnnnnnnnnnnnnnnnnnnnnnnnnnnnnnnnnnnnnnnnnnnnnnnnnnnnnnnnnnnnnnnnnnnnnnnnnnnnnnnnnnnnnnnnnnnnnnnnnnnnnnnnnnnnnnnnnnnnnnnnnnnnnnnnnnnnnnnnnnnnnnnnnnnnnnnnnnnnnnnnnnnnnnnnnnnnnnnnnnnnnnnnnnnnnnnnnnnnnnnnnnnnnnnnnnnnnnnnnnnnnnnnnnnnnnnnnnnnnnnnnnnnnnnnnnnnnnnnnnnnnnnnnnnnnnnnnnnnnnnnnnnnnnnnnnnnnnnnnnnnnnnnnnnnnnnnnnnnnnnnnnnnnnnnnnnnnnnnnnnnnnnnnnnnnnnnnnnnnnnnnnnnnnnnnnnnnnnnnnnnnnnnnnnnnnnnnnnnnnnnnnnnnnnnnnnnnnnnnnnnnnnnnnnnnnnnnnnnnnnnnnnnnnnnnnnnnnnnnnnnnnnnnnnnnnnnnnnnnnnnnnnnnnnnnnnnnnnnnnnnnnnnnnnnnnnnnnnnnnnnnnnnnnnnnnnnnnnnnnnnnnnnnnnnnnnnnnnnnnnnnnnnnnnnnnnnnnnnnnnnnnnnnnnnnnnnnnnnnnnnnnnnnnnnnnnnnnnnnnnnnnnnnnnnnnnnnnnnnnnnnnnnnnnnnnnnnnnnnnnnnnnnnnnnnnnnnnnnnnnnnnnnnnnnnnnnnnnnnnnnnnnnnnnnnnnnnnnnnnnnnnnnnnnnnnnnnnnnnnnnnnnnnnnnnnnnnnnnnnnnnnnnnnnnnnnnnnnnnnnnnnnnnnnnnnnnnnnnnnnnnnnnnnnnnnnnnnnnnnnnnnnnnnnnnnnnnnnnnnnnnnnnnnnnnnnnnnnnnnnnnnnnnnnnnnnnnnnnnnnnnnnnnnnnnnnnnnnnnnnnnnnnnnnnnnnnnnnnnnnnnnnnnnnnnnnnnnnnnnnnnnnnnnnnnnnnnnnnnnnnnnnnnnnnnnnnnnnnnnnnnnnnnnnnnnnnnnnnnnnnnnnnnnnnnnnnnnnnnnnnnnnnnnnnnnnnnnnnnnnnnnnnnnnnnnnnnnnnnnnnnnnnnnnnnnnnnnnnnnnnnnnnnnnnnnnnnnnnnnnnnnnnnnnnnnnnnnnnnnnnnnnnnnnnnnnnnnnnnnnnnnnnnnnnnnnnnnnnnnnnnnnnnnnnnnnnnnnnnnnnnnnnnnnnnnnnnnnnnnnnnnnnnnnnnnnnnnnnnnnnnnnnnnnnnnnnnnnnnnnnnnnnnnnnnnnnnnnnnnnnnnnnnnnnnnnnnnnnnnnnnnnnnnnnnnnnnnnnnnnnnnnnnnnnnnnnnnnnnnnnnnnnnnnnnnnnnnnnnnnnnnnnnnnnnnnnnnnnnnnnnnnnnnnnnnnnnnnnnnnnnnnnnnnnnnnnnnnnnnnnnnnnnnnnnnnnnnnnnnnnnnnnnnnnnnnnnnnnnnnnnnnnnnnnnnnnnnnnnnnnnnnnnnnnnnnnnnnnnnnnnnnnnnnnnnnnnnnnnnnnnnnnnnnnnnnnnnnnnnnnnnnnnnnnnnnnnnnnnnnnnnnnnnnnnnnnnnnnnnnnnnnnnnnnnnnnnnnnnnnnnnnnnnnnnnnnnnnnnnnnnnnnnnnnnnnnnnnnnnnnnnnnnnnnnnnnnnnnnnnnnnnnnnnnnnnnnnnnnnnnnnnnnnnnnnnnnnnnnnnnnnnnnnnnnnnnnnnnnnnnnnnnnnnnnnnnnnnnnnnnnnnnnnnnnnnnnnnnnnnnnnnnnnnnnnnnnnnnnnnnnnnnnnnnnnnnnnnnnnnnnnnnnnnnnnnnnnnnnnnnnnnnnnnnnnnnnnnnnnnnnnnnnnnnnnnnnnnnnnnnnnnnnnnnnnnnnnnnnnnnnnnnnnnnnnnnnnnnnnnnnnnnnnnnnnnnnnnnnnnnnnnnnnnnnnnnnnnnnnnnnnnnnnnnnnnnnnnnnnnnnnnnnnnnnnnnnnnnnnnnnnnnnnnnnnnnnnnnnnnnnnnnnnnnnnnnnnnnnnnnnnnnnnnnnnnnnnnnnnnnnnnnnnnnnnnnnnnnnnnnnnnnnnnnnnnnnnnnnnnnnnnnnnnnnnnnnnnnnnnnnnnnnnnnnnnnnnnnnnnnnnnnnnnnnnnnnnnnnnnnnnnnnnnnnnnnnnnnnnnnnnnnnnnnnnnnnnnnnnnnnnnnnnnnnnnnnnnnnnnnnnnnnnnnnnnnnnnnnnnnnnnnnnnnnnnnnnnnnnnnnnnnnnnnnnnnnnnnnnnnnnnnnnnnnnnnnnnnnnnnnnnnnnnnnnnnnnnnnnnnnnnnnnnnnnnnnnnnnnnnnnnnnnnnnnnnnnnnnnnnnnnnnnnnnnnnnnnnnnnnnnnnnnnnnnnnnnnnnnnnnnnnnnnnnnnnnnnnnnnnnnnnnnnnnnnnnnnnnnnnnnnnnnnnnnnnnnnnnnnnnnnnnnnnnnnnnnnnnnnnnnnnnnnnnnnnnnnnnnnnnnnnnnnnnnnnnnnnnnnnnnnnnnnnnnnnnnnnnnnnnnnnnnnnnnnnnnnnnnnnnnnnnnnnnnnnnnnnnnnnnnnnnnnnnnnnnnnnnnnnnnnnnnnnnnnnnnnnnnnnnnnnnnnnnnnnnnnnnnnnnnnnnnnnnnnnnnnnnnnnnnnnnnnnnnnnnnnnnnnnnnnnnnnnnnnnnnnnnnnnnnnnnnnnnnnnnnnnnnnnnnnnnnnnnnnnnnnnnnnnnnnnnnnnnnnnnnnnnnnnnnnnnnnnnnnnnnnnnnnnnnnnnnnnnnnnnnnnnnnnnnnnnnnnnnnnnnnnnnnnnnnnnnnnnnnnnnnnnnnnnnnnnnnnnnnnnnnnnnnnnnnnnnnnnnnnnnnnnnnnnnnnnnnnnnnnnnnnnnnnnnnnnnnnnnnnnnnnnnnnnnnnnnnnnnnnnnnnnnnnnnnnnnnnnnnnnnnnnnnnnnnnnnnnnnnnnnnnnnnnnnnnnnnnnnnnnnnnnnnnnnnnnnnnnnnnnnnnnnnnnnnnnnnnnnnnnnnnnnnnnnnnnnnnnnnnnnnnnnnnnnnnnnnnnnnnnnnnnnnnnnnnnnnnnnnnnnnnnnnnnnnnnnnnnnnnnnnnnnnnnnnnnnnnnnnnnnnnnnnnnnnnnnnnnnnnnnnnnnnnnnnnnnnnnnnnnnnnnnnnnnnnnnnnnnnnnnnnnnnnnnnnnnnnnnnnnnnnnnnnnnnnnnnnnnnnnnnnnnnnnnnnnnnnnnnnnnnnnnnnnnnnnnnnnnnnnnnnnnnnnnnnnnnnnnnnnnnnnnnnnnnnnnnnnnnnnnnnnnnnnnnnnnnnnnnnnnnnnnnnnnnnnnnnnnnnnnnnnnnnnnnnnnnnnnnnnnnnnnnnnnnnnnnnnnnnnnnnnnnnnnnnnnnnnnnnnnnnnnnnnnnnnnnnnnnnnnnnnnnnnnnnnnnnnnnnnnnnnnnnnnnnnnnnnnnnnnnnnnnnnnnnnnnnnnnnnnnnnnnnnnnnnnnnnnnnnnnnnnnnnnnnnnnnnnnnnnnnnnnnnnnnnnnnnnnnnnnnnnnnnnnnnnnnnnnnnnnnnnnnnnnnnnnnnnnnnnnnnnnnnnnnnnnnnnnnnnnnnnnnnnnnnnnnnnnnnnnnnnnnnnnnnnnnnnnnnnnnnnnnnnnnnnnnnnnnnnnnnnnnnnnnnnnnnnnnnnnnnnnnnnnnnnnnnnnnnnnnnnnnnnnnnnnnnnnnnnnnnnnnnnnnnnnnnnnnnnnnnnnnnnnnnnnnnnnnnnnnnnnnnnnnnnnnnnnnnnnnnnnnnnnnnnnnnnnnnnnnnnnnnnnnnnnnnnnnnnnnnnnnnnnnnnnnnnnnnnnnnnnnnnnnnnnnnnnnnnnnnnnnnnnnnnnnnnnnnnnnnnnnnnnnnnnnnnnnnnnnnnnnnnnnnnnnnnnnnnnnnnnnnnnnnnnnnnnnnnnnnnnnnnnnnnnnnnnnnnnnnnnnnnnnnnnnnnnnnnnnnnnnnnnnnnnnnnnnnnnnnnnnnnnnnnnnnnnnnnnnnnnnnnnnnnnnnnnnnnnnnnnnnnnnnnnnnnnnnnnnnnnnnnnnnnnnnnnnnnnnnnnnnnnnnnnnnnnnnnnnnnnnnnnnnnnnnnnnnnnnnnnnnnnnnnnnnnnnnnnnnnnnnnnnnnnnnnnnnnnnnnnnnnnnnnnnnnnnnnnnnnnnnnnnnnnnnnnnnnnnnnnnnnnnnnnnnnnnnnnnnnnnnnnnnnnnnnnnnnnnnnnnnnnnnnnnnnnnnnnnnnnnnnnnnnnnnnnnnnnnnnnnnnnnnnnnnnnnnnnnnnnnnnnnnnnnnnnnnnnnnnnnnnnnnnnnnnnnnnnnnnnnnnnnnnnnnnnnnnnnnnnnnnnnnnnnnnnnnnnnnnnnnnnnnnnnnnnnnnnnnnnnnnnnnnnnnnnnnnnnnnnnnnnnnnnnnnnnnnnnnnnnnnnnnnnnnnnnnnnnnnnnnnnnnnnnnnnnnnnnnnnnnnnnnnnnnnnnnnnnnnnnnnnnnnnnnnnnnnnnnnnnnnnnnnnnnnnnnnnnnnnnnnnnnnnnnnnnnnnnnnnnnnnnnnnnnnnnnnnnnnnnnnnnnnnnnnnnnnnnnnnnnnnnnnnnnnnnnnnnnnnnnnnnnnnnnnnnnnnnnnnnnnnnnnnnnnnnnnnnnnnnnnnnnnnnnnnnnnnnnnnnnnnnnnnnnnnnnnnnnnnnnnnnnnnnnnnnnnnnnnnnnnnnnnnnnnnnnnnnnnnnnnnnnnnnnnnnnnnnnnnnnnnnnnnnnnnnnnnnnnnnnnnnnnnnnnnnnnnnnnnnnnnnnnnnnnnnnnnnnnnnnnnnnnnnnnnnnnnnnnnnnnnnnnnnnnnnnnnnnnnnnnnnnnnnnnnnnnnnnnnnnnnnnnnnnnnnnnnnnnnnnnnnnnnnnnnnnnnnnnnnnnnnnnnnnnnnnnnnnnnnnnnnnnnnnnnnnnnnnnnnnnnnnnnnnnnnnnnnnnnnnnnnnnnnnnnnnnnnnnnnnnnnnnnnnnnnnnnnnnnnnnnnnnnnnnnnnnnnnnnnnnnnnnnnnnnnnnnnnnnnnnnnnnnnnnnnnnnnnnnnnnnnnnnnnnnnnnnnnnnnnnnnnnnnnnnnnnnnnnnnnnnnnnnnnnnnnnnnnnnnnnnnnnnnnnnnnnnnnnnnnnnnnnnnnnnnnnnnnnnnnnnnnnnnnnnnnnnnnnnnnnnnnnnnnnnnnnnnnnnnnnnnnnnnnnnnnnnnnnnnnnnnnnnnnnnnnnnnnnnnnnnnnnnnnnnnnnnnnnnnnnnnnnnnnnnnnnnnnnnnnnnnnnnnnnnnnnnnnnnnnnnnnnnnnnnnnnnnnnnnnnnnnnnnnnnnnnnnnnnnnnnnnnnnnnnnnnnnnnnnnnnnnnnnnnnnnnnnnnnnnnnnnnnnnnnnnnnnnnnnnnnnnnnnnnnnnnnnnnnnnnnnnnnnnnnnnnnnnnnnnnnnnnnnnnnnnnnnnnnnnnnnnnnnnnnnnnnnnnnnnnnnnnnnnnnnnnnnnnnnnnnnnnnnnnnnnnnnnnnnnnnnnnnnnnnnnnnnnnnnnnnnnnnnnnnnnnnnnnnnnnnnnnnnnnnnnnnnnnnnnnnnnnnnnnnnnnnnnnnnnnnnnnnnnnnnnnnnnnnnnnnnnnnnnnnnnnnnnnnnnnnnnnnnnnnnnnnnnnnnnnnnnnnnnnnnnnnnnnnnnnnnnnnnnnnnnnnnnnnnnnnnnnnnnnnnnnnnnnnnnnnnnnnnnnnnnnnnnnnnnnnnnnnnnnnnnnnnnnnnnnnnnnnnnnnnnnnnnnnnnnnnnnnnnnnnnnnnnnnnnnnnnnnnnnnnnnnnnnnnnnnnnnnnnnnnnnnnnnnnnnnnnnnnnnnnnnnnnnnnnnnnnnnnnnnnnnnnnnnnnnnnnnnnnnnnnnnnnnnnnnnnnnnnnnnnnnnnnnnnnnnnnnnnnnnnnnnnnnnnnnnnnnnnnnnnnnnnnnnnnnnnnnnnnnnnnnnnnnnnnnnnnnnnnnnnnnnnnnnnnnnnnnnnnnnnnnnnnnnnnnnnnnnnnnnnnnnnnnnnnnnnnnnnnnnnnnnnnnnnnnnnnnnnnnnnnnnnnnnnnnnnnnnnnnnnnnnnnnnnnnnnnnnnnnnnnnnnnnnnnnnnnnnnnnnnnnnnnnnnnnnnnnnnnnnnnnnnnnnnnnnnnnnnnnnnnnnnnnnnnnnnnnnnnnnnnnnnnnnnnnnnnnnnnnnnnnnnnnnnnnnnnnnnnnnnnnnnnnnnnnnnnnnnnnnnnnnnnnnnnnnnnnnnnnnnnnnnnnnnnnnnnnnnnnnnnnnnnnnnnnnnnnnnnnnnnnnnnnnnnnnnnnnnnnnnnnnnnnnnnnnnnnnnnnnnnnnnnnnnnnnnnnnnnnnnnnnnnnnnnnnnnnnnnnnnnnnnnnnnnnnnnnnnnnnnnnnnnnnnnnnnnnnnnnnnnnnnnnnnnnnnnnnnnnnnnnnnnnnnnnnnnnnnnnnnnnnnnnnnnnnnnnnnnnnnnnnnnnnnnnnnnnnnnnnnnnnnnnnnnnnnnnnnnnnnnnnnnnnnnnnnnnnnnnnnnnnnnnnnnnnnnnnnnnnnnnnnnnnnnnnnnnnnnnnnnnnnnnnnnnnnnnnnnnnnnnnnnnnnnnnnnnnnnnnnnnnnnnnnnnnnnnnnnnnnnnnnnnnnnnnnnnnnnnnnnnnnnnnnnnnnnnnnnnnnnnnnnnnnnnnnnnnnnnnnnnnnnnnnnnnnnnnnnnnnnnnnnnnnnnnnnnnnnnnnnnnnnnnnnnnnnnnnnnnnnnnnnnnnnnnnnnnnnnnnnnnnnnnnnnnnnnnnnnnnnnnnnnnnnnnnnnnnnnnnnnnnnnnnnnnnnnnnnnnnnnnnnnnnnnnnnnnnnnnnnnnnnnnnnnnnnnnnnnnnnnnnnnnnnnnnnnnnnnnnnnnnnnnnnnnnnnnnnnnnnnnnnnnnnnnnnnnnnnnnnnnnnnnnnnnnnnnnnnnnnnnnnnnnnnnnnnnnnnnnnnnnnnnnnnnnnnnnnnnnnnnnnnnnnnnnnnnnnnnnnnnnnnnnnnnnnnnnnnnnnnnnnnnnnnnnnnnnnnnnnnnnnnnnnnnnnnnnnnnnnnnnnnnnnnnnnnnnnnnnnnnnnnnnnnnnnnnnnnnnnnnnnnnnnnnnnnnnnnnnnnnnnnnnnnnnnnnnnnnnnnnnnnnnnnnnnnnnnnnnnnnnnnnnnnnnnnnnnnnnnnnnnnnnnnnnnnnnnnnnnnnnnnnnnnnnnnnnnnnnnnnnnnnnnnnnnnnnnnnnnnnnnnnnnnnnnnnnnnnnnnnnnnnnnnnnnnnnnnnnnnnnnnnnnnnnnnnnnnnnnnnnnnnnnnnnnnnnnnnnnnnnnnnnnnnnnnnnnnnnnnnnnnnnnnnnnnnnnnnnnnnnnnnnnnnnnnnnnnnnnnnnnnnnnnnnnnnnnnnnnnnnnnnnnnnnnnnnnnnnnnnnnnnnnnnnnnnnnnnnnnnnnnnnnnnnnnnnnnnnnnnnnnnnnnnnnnnnnnnnnnnnnnnnnnnnnnnnnnnnnnnnnnnnnnnnnnnnnnnnnnnnnnnnnnnnnnnnnnnnnnnnnnnnnnnnnnnnnnnnnnnnnnnnnnnnnnnnnnnnnnnnnnnnnnnnnnnnnnnnnnnnnnnnnnnnnnnnnnnnnnnnnnnnnnnnnnnnnnnnnnnnnnnnnnnnnnnnnnnnnnnnnnnnnnnnnnnnnnnnnnnnnnnnnnnnnnnnnnnnnnnnnnnnnnnnnnnnnnnnnnnnnnnnnnnnnnnnnnnnnnnnnnnnnnnnnnnnnnnnnnnnnnnnnnnnnnnnnnnnnnnnnnnnnnnnnnnnnnnnnnnnnnnnnnnnnnnnnnnnnnnnnnnnnnnnnnnnnnnnnnnnnnnnnnnnnnnnnnnnnnnnnnnnnnnnnnnnnnnnnnnnnnnnnnnnnnnnnnnnnnnnnnnnnnnnnnnnnnnnnnnnnnnnnnnnnnnnnnnnnnnnnnnnnnnnnnnnnnnnnnnnnnnnnnnnnnnnnnnnnnnnnnnnnnnnnnnnnnnnnnnnnnnnnnnnnnnnnnnnnnnnnnnnnnnnnnnnnnnnnnnnnnnnnnnnnnnnnnnnnnnnnnnnnnnnnnnnnnnnnnnnnnnnnnnnnnnnnnnnnnnnnnnnnnnnnnnnnnnnnnnnnnnnnnnnnnnnnnnnnnnnnnnnnnnnnnnnnnnnnnnnnnnnnnnnnnnnnnnnnnnnnnnnnnnnnnnnnnnnnnnnnnnnnnnnnnnnnnnnnnnnnnnnnnnnnnnnnnnnnnnnnnnnnnnnnnnnnnnnnnnnnnnnnnnnnnnnnnnnnnnnnnnnnnnnnnnnnnnnnnnnnnnnnnnnnnnnnnnnnnnnnnnnnnnnnnnnnnnnnnnnnnnnnnnnnnnnnnnnnnnnnnnnnnnnnnnnnnnnnnnnnnnnnnnnnnnnnnnnnnnnnnnnnnnnnnnnnnnnnnnnnnnnnnnnnnnnnnnnnnnnnnnnnnnnnnnnnnnnnnnnnnnnnnnnnnnnnnnnnnnnnnnnnnnnnnnnnnnnnnnnnnnnnnnnnnnnnnnnnnnnnnnnnnnnnnnnnnnnnnnnnnnnnnnnnnnnnnnnnnnnnnnnnnnnnnnnnnnnnnnnnnnnnnnnnnnnnnnnnnnnnnnnnnnnnnnnnnnnnnnnnnnnnnnnnnnnnnnnnnnnnnnnnnnnnnnnnnnnnnnnnnnnnnnnnnnnnnnnnnnnnnnnnnnnnnnnnnnnnnnnnnnnnnnnnnnnnnnnnnnnnnnnnnnnnnnnnnnnnnnnnnnnnnnnnnnnnnnnnnnnnnnnnnnnnnnnnnnnnnnnnnnnnnnnnnnnnnnnnnnnnnnnnnnnnnnnnnnnnnnnnnnnnnnnnnnnnnnnnnnnnnnnnnnnnnnnnnnnnnnnnnnnnnnnnnnnnnnnnnnnnnnnnnnnnnnnnnnnnnnnnnnnnnnnnnnnnnnnnnnnnnnnnnnnnnnnnnnnnnnnnnnnnnnnnnnnnnnnnnnnnnnnnnnnnnnnnnnnnnnnnnnnnnnnnnnnnnnnnnnnnnnnnnnnnnnnnnnnnnnnnnnnnnnnnnnnnnnnnnnnnnnnnnnnnnnnnnnnnnnnnnnnnnnnnnnnnnnnnnnnnnnnnnnnnnnnnnnnnnnnnnnnnnnnnnnnnnnnnnnnnnnnnnnnnnnnnnnnnnnnnnnnnnnnnnnnnnnnnnnnnnnnnnnnnnnnnnnnnnnnnnnnnnnnnnnnnnnnnnnnnnnnnnnnnnnnnnnnnnnnnnnnnnnnnnnnnnnnnnnnnnnnnnnnnnnnnnnnnnnnnnnnnnnnnnnnnnnnnnnnnnnnnnnnnnnnnnnnnnnnnnnnnnnnnnnnnnnnnnnnnnnnnnnnnnnnnnnnnnnnnnnnnnnnnnnnnnnnnnnnnnnnnnnnnnnnnnnnnnnnnnnnnnnnnnnnnnnnnnnnnnnnnnnnnnnnnnnnnnnnnnnnnnnnnnnnnnnnnnnnnnnnnnnnnnnnnnnnnnnnnnnnnnnnnnnnnnnnnnnnnnnnnnnnnnnnnnnnnnnnnnnnnnnnnnnnnnnnnnnnnnnnnnnnnnnnnnnnnnnnnnnnnnnnnnnnnnnnnnnnnnnnnnnnnnnnnnnnnnnnnnnnnnnnnnnnnnnnnnnnnnnnnnnnnnnnnnnnnnnnnnnnnnnnnnnnnnnnnnnnnnnnnnnnnnnnnnnnnnnnnnnnnnnnnnnnnnnnnnnnnnnnnnnnnnnnnnnnnnnnnnnnnnnnnnnnnnnnnnnnnnnnnnnnnnnnnnnnnnnnnnnnnnnnnnnnnnnnnnnnnnnnnnnnnnnnnnnnnnnnnnnnnnnnnnnnnnnnnnnnnnnnnnnnnnnnnnnnnnnnnnnnnnnnnnnnnnnnnnnnnnnnnnnnnnnnnnnnnnnnnnnnnnnnnnnnnnnnnnnnnnnnnnnnnnnnnnnnnnnnnnnnnnnnnnnnnnnnnnnnnnnnnnnnnnnnnnnnnnnnnnnnnnnnnnnnnnnnnnnnnnnnnnnnnnnnnnnnnnnnnnnnnnnnnnnnnnnnnnnnnnnnnnnnnnnnnnnnnnnnnnnnnnnnnnnnnnnnnnnnnnnnnnnnnnnnnnnnnnnnnnnnnnnnnnnnnnnnnnnnnnnnnnnnnnnnnnnnnnnnnnnnnnnnnnnnnnnnnnnnnnnnnnnnnnnnnnnnnnnnnnnnnnnnnnnnnnnnnnnnnnnnnnnnnnnnnnnnnnnnnnnnnnnnnnnnnnnnnnnnnnnnnnnnnnnnnnnnnnnnnnnnnnnnnnnnnnnnnnnnnnnnnnnnnnnnnnnnnnnnnnnnnnnnnnnnnnnnnnnnnnnnnnnnnnnnnnnnnnnnnnnnnnnnnnnnnnnnnnnnnnnnnnnnnnnnnnnnnnnnnnnnnnnnnnnnnnnnnnnnnnnnnnnnnnnnnnnnnnnnnnnnnnnnnnnnnnnnnnnnnnnnnnnnnnnnnnnnnnnnnnnnnnnnnnnnnnnnnnnnnnnnnnnnnnnnnnnnnnnnnnnnnnnnnnnnnnnnnnnnnnnnnnnnnnnnnnnnnnnnnnnnnnnnnnnnnnnnnnnnnnnnnnnnnnnnnnnnnnnnnnnnnnnnnnnnnnnnnnnnnnnnnnnnnnnnnnnnnnnnnnnnnnnnnnnnnnnnnnnnnnnnnnnnnnnnnnnnnnnnnnnnnnnnnnnnnnnnnnnnnnnnnnnnnnnnnnnnnnnnnnnnnnnnnnnnnnnnnnnnnnnnnnnnnnnnnnnnnnnnnnnnnnnnnnnnnnnnnnnnnnnnnnnnnnnnnnnnnnnnnnnnnnnnnnnnnnnnnnnnnnnnnnnnnnnnnnnnnnnnnnnnnnnnnnnnnnnnnnnnnnnnnnnnnnnnnnnnnnnnnnnnnnnnnnnnnnnnnnnnnnnnnnnnnnnnnnnnnnnnnnnnnnnnnnnnnnnnnnnnnnnnnnnnnnnnnnnnnnnnnnnnnnnnnnnnnnnnnnnnnnnnnnnnnnnnnnnnnnnnnnnnnnnnnnnnnnnnnnnnnnnnnnnnnnnnnnnnnnnnnnnnnnnnnnnnnnnnnnnnnnnnnnnnnnnnnnnnnnnnnnnnnnnnnnnnnnnnnnnnnnnnnnnnnnnnnnnnnnnnnnnnnnnnnnnnnnnnnnnnnnnnnnnnnnnnnnnnnnnnnnnnnnnnnnnnnnnnnnnnnnnnnnnnnnnnnnnnnnnnnnnnnnnnnnnnnnnnnnnnnnnnnnnnnnnnnnnnnnnnnnnnnnnnnnnnnnnnnnnnnnnnnnnnnnnnnnnnnnnnnnnnnnnnnnnnnnnnnnnnnnnnnnnnnnnnnnnnnnnnnnnnnnnnnnnnnnnnnnnnnnnnnnnnnnnnnnnnnnnnnnnnnnnnnnnnnnnnnnnnnnnnnnnnnnnnnnnnnnnnnnnnnnnnnnnnnnnnnnnnnnnnnnnnnnnnnnnnnnnnnnnnnnnnnnnnnnnnnnnnnnnnnnnnnnnnnnnnnnnnnnnnnnnnnnnnnnnnnnnnnnnnnnnnnnnnnnnnnnnnnnnnnnnnnnnnnnnnnnnnnnnnnnnnnnnnnnnnnnnnnnnnnnnnnnnnnnnnnnnnnnnnnnnnnnnnnnnnnnnnnnnnnnnnnnnnnnnnnnnnnnnnnnnnnnnnnnnnnnnnnnnnnnnnnnnnnnnnnnnnnnnnnnnnnnnnnnnnnnnnnnnnnnnnnnnnnnnnnnnnnnnnnnnnnnnnnnnnnnnnnnnnnnnnnnnnnnnnnnnnnnnnnnnnnnnnnnnnnnnnnnnnnnnnnnnnnnnnnnnnnnnnnnnnnnnnnnnnnnnnnnnnnnnnnnnnnnnnnnnnnnnnnnnnnnnnnnnnnnnnnnnnnnnnnnnnnnnnnnnnnnnnnnnnnnnnnnnnnnnnnnnnnnnnnnnnnnnnnnnnnnnnnnnnnnnnnnnnnnnnnnnnnnnnnnnnnnnnnnnnnnnnnnnnnnnnnnnnnnnnnnnnnnnnnnnnnnnnnnnnnnnnnnnnnnnnnnnnnnnnnnnnnnnnnnntttggagcccgaaggtcccagaacgattggccgacggggacatcgaccttcctgacgctggcgtcgagcgaggcacgagcatggacgccagcaacatctcctgtagtccatactcgcaagctcgctgcactccaggctcaccaacgttggaaggcaaattcacaaattcacaaccggtaaatatggcttgtgaatttgcaacctgctgatagacgggtaattatgaggctaattcacaaaaaaggggtctcttatacatccgcggaagccgattgtaaacaggatatgatgtatccacgctaccagtctataatacatatagaaatagtatatataatatataatagtattatatattattatatattgatattatatcatctctaccttcccttcatctcttgtttgcggcatgagccactgcaaaccggcattctcccctggtccggctggatataagagataagcgtattttgtgaatttgtcccccaactcactgtgccacaataacacacggattcacaagccatatttaccggttgtgaatttgtgaatctgaccttgccggccttaaggaagtttgaaattagagccctattttggacttgacaaattattccttggtaaatttggtgtataatagctatggggcataatgatgttagcctgtggaacggcctctgtaaaggatcaacaagctatcaaccctccccatgcgacaggagcttcaatgtattataatttgacagacaaaccctggatcagtgtgctacagcttgacgggcattctgccaggctcggcctggctgaggtcctgcgaaaagcacacacactgcgtttggcttacggcaatccgatggaccgcatgtccgttttccgtttcctcctcgccctgggctattggtgttttgccaatacaaaacaagcgccggtatcagataagccactgcctcaggcatggacggactggcttgaacaaaaccaagaatatttcgaattgttcggtgatggccccagattctaccaatccccaggaacatccagaatacgccccagcacggaccttatccacgagcttcccacggcaaacaatttctggcacttccgccatgtgaccgatttcatcgatggcatttgcccagcttgctgcgttaccggtctgctgcgcctgccactctttaccaccgtaggcggcagcggaatcggagccggcatcaacagaactcctcccttctatgccatctggcagggtgatagtctgtcggaatcgatattcctgaattgggaacccacttcccggttgggtgttcctgcctggctgaacccgtttggatcccaaaacgagaaggatgtagccttgctgactggcctcacctggctgccccgcaaggtattcctgcttggcccggtgtcagacggagcaaaatgcagcgcctgcggagaagagcatgagcctctggtctatgcctgcaacaatgaggcggtgaaagtgcctccgaaccttgtctggaacgaccctcacgcgatttaccgggatgacaataatggcctgactgcccaggtggctctgatgtccggggacaaatacactttcgctaacagggattggcataaacccctggtcggcttcttacgggcgaaaggcatgtctcggaccgccacgctgtttttagtgggcttcacaagcgttcaagccaaatgtgtggacgtttgggaaaagaccattgccctatccggaaaaacaagctccgaggaactgctggaccagatatccgaaagagcctactccctgcacaggatgaggaaacaagaccgccggggcgattacaaggaatccgtgggaatcaccgccgtggcggacatcatcccgcacgtagagcatcgggttgacgtccattcgggcgagatggtggaaaacagcggcaatgtctggcaggaagcggatgaagattacggattcttcatgaagcgttttgccgtttctctagtgccggaaattacggttgccgccaagcttgaacgagaacaactggctcggcgcaagccctggcccctaaaaccaaaatcaattaaaaaaccttcatccggaggcgataatgaatgagagcaccgtgaaatttgttcggagcctgggcgaactcaaagagggcgacctgggcttgctcagaaagctcaggggtcgccgtctggatgaatccctgccgggtttcgacctgttttccggcctgtggtggccactccgcagtataagccccaaaacccccaggcggaaggtggtctggctagtcaccaagcttttcgcggaattccgctttgagcaaaagaaaggcgccagcctgccttggctcatgggcagaatatgccgtggacttaaagaagaaaaagagttcccacgtgttttagccaggttcgaccgcttgctcacgctcgagttgaaccaactggaggaaccgctggcgcaagtgctcgcgattttaaaaagacatgacattgccagtctggactgggttgccctcatcgatgacctctccgcttgggaacgggaatcaaacagagcgatatggtcagacacatttatttcagcatttaataatcagcaaggaggaatcaaatgttgattgaaatacacatgatccaaaaccacagcccggccaacctgaaccgggacgacctgggcgcgcccaagacctgttatttcggtggggtgttgcggtcccgcatctccagccagtgcctaaagcggagcatcaggatgagcgatgaattcaaaaacttgctcgggggtatccgtacccgtcggttggccgagttgattacaaaagctacaggacaggactgcaggaatcaggcagaggaagttctgaacaaagccggtttgaaacacgaaaacggacatagtaagatgctggtgttcatgacccggaacaagatcgatgcccttgctcaaattgtcaccagcgaaggcctgagtgttgcagagaaagccaagaaagcggcagatgtaatatcgggggcaatacattcccctgacatcgctctgtgcggaagaatgctcgagcccgataccaaggacaagaacacagacaaggtcaagtgggaaaataccactgttgaagcagccctgcaggtgtcgcacgccatttcaacccacatcgcccgcccagaaatagattactatgtagcagctgatgacgagcctggcgacgacacaggtgctggattcatagacgaggcgatgtttgcttcggcctgtttctacaaatattactcaattgattggaataccttgataatcaacctccagggtaatgaaaagttggcagctcatactgtcggagcctttatccaggccgctgcactcactaatcccagcggaaagcagaacagctttgccgcacataaccttcccgatggaatattggtagaaataaaagagacacctgtcagctatgcaaatgcctttgtgcgaccggtgggaatcgttaaggattctgacttggtagaacaaagcattggccaactggccaactatgtgaaggatataagtgccggtttcttccctggacagatgaaaggcaacgctctgtggttctcgcccaatggacgttatcccctaaagcctcaacagggcacgctggacataaagccagtttgcaacctgctagaacttgttcgcgaagcagttgagatgttgggttttgaatgggatgatgtaaaaaacgagaaagtagagagttgaaatgtcttctccgcctaataccctgttcctgagattggaggctccccttcaggcctggggaagcaatgaggccaaattcgccgtgcgcaggacagccgacgcgcccaccaaatccggagtggcaggcctgctctgcgctgccctgggaatcagccgggccgaagccggacagtattggctgggtgaaattgccaaattgcgcatgggggtgcggatagaccgcccgggcatccgctggtgggattaccatactgtgggagcggagcagaagctgcgcatttctgacctgaaaatgcccaacggcctagttctggttggcactgccctggccaaaaacctgggcgcggacaagatcaaatccaaacccggggctttgctctcccgacgcgagtatttggctgatgccagcttcctggttgcgctccagggtgaaccggatatcgtggcacaactggctgaagcgctgaaaaaaccagtctggacgctttatctggggcgaaaatcctgtcccccctcccgtccggtggatgaacacccgccagggttttatgccagtctgaaagaggctttgcggtcgatcccggcgcaactgagggaaaaaggcgaaccgatacctgacagtgttccctgtgtgctcgactgggttccggcccatgatgacgtgcacgctccgccgaacgccgaagcgcattacgacgtgccggtgtcctttgagcctccccaccacttgccccggctggtgatccgctgtaacctgccattggaccgcaacttcgaggcagagaccgtgctttccggcaaagcctggcaaccgccccgcaaccgggcaaattacgacaatcctgaatacaaaagggtccgcgctgagcgtttggtgatggacaatgccgcctgcatgttctgcaaggcacccgccactactgtgcagcacgtgaattaccgacgcgccggaggcagcgagaagccggaggacttgcgcgccctctgccgcctctgccacgatgcctgcaccatgctggaatatggcagcggcatgaccatggaccgcatagatccctgtgaccccgcctggcgtgagcgcatcttggccaaacgcgaggaaataatcaaattccgctcgctggagcagcgcaggcgcaaactcgatccgaaggaggagaacggatgatgtatctatcccaactgctcatcgacacaggcggcaaccctgaccggccaaggcccgggcgcttgtggctgaacaatatctataatgtccaccggcggctcagcatggctttccccatgcgcaagcgcaaggaaggagacccgaggtttctgcagccctttgaccccgcagattttgaaaagcgccagttcctctttcgggtggacaacaacaccgatggagaaaatcaaagggcgatggttttggtgcagtcgtccctgccgccggattgggactgggctttccagaatgccacgggatttttggcagcccctccccaggttaaggaatacgatccccagttctcagcaggtcagcggctgcgcttccgcatcctcgtgaatgccagtgtcaaacgcaaaatcgacgagttgcgggaaggacccggaggaaaggaaaaaacgggaagggttctgcacaaacgggtcgcccttacctgggacacaaattccaacccaaaggatgcggtggcgcaatggtttgccgccaaggctggcagactgggcttcacgcccggggagaccgaactggtaagcctgggctgggtatacggttccaaaccggagccccggggaaattcgccccggcgtgagaacgaataccgtcccctgagataccgttccgccctgctggaaggttatctgacagtggatgatgcctttctgttccgggaagccttggaaaaaggtatcggcagcgccaaaggaatgggcttcggcctcctttccgtggttccggcaagtgatgcgtaacagagaccttcacctaatgccaaaaatgcgggaccgcttcacctatctctatgtggagcatgccaaaatagacaaagaacaacaggcaatcgcctttcacgatgccatgggctccactcctgttccctgcgctggactggccctgctgatgctggggccaggcgtatccatcacccatgcggccatccttgttttagcagaatgcggctgtttggtggcttgggtgggggaacagggagtccgcttttactcatccgggacagggaccacccgtagttccgccaaccttatgcgtcaggctgccgcctggtcaaatcgagatacgcatctgcggatagttcgcagaatgtatgaattgaggttcaaggaaaaactggacccaaccctctctcttgaacagataaggggaaaagagggagcgagagtacgggatacctatttcagactttcaaaagaattcgatgtgcccatgagtgcgaggaattacgacaggagcaactggaataaaaccgaccccatcaacagagccctgtccgttgccaattcctgtctctatggcatctgccacgccgcgatagtggccgctggctattcacctgccctgggtttcgttcatactggcaaacaactgtcatttgtttatgacattgccgatctttataaaatggaaacctccgtgcccgcggctttcatagccacagccgcaggggtcgataacctggacagaaggacacgcattgcctgccgtgaccagttctatcaatttggtctgctaaagaagatagtggccgacattcacgcccttttcggtattctggaaacttcggacgatgagccagaccttgctgatgtcgatccagccgtgccaggcgggctttggaacccagatgataaagtgagccccggcggcttgtcatggggtctggatgatcctggaggccatgatgatggttctggtgcttgaaaaagttccctctggcctgagaggagaaattacacgctggctcctcgaaatcaaggctggagtatttgtcggtcaggtatcggccatgataagggaaaagctgtgggacaaggccaggtctggttgtgccggtggaacttgtatcatgatttacagcaagcattgcgaacaaggctttggaattgagttttggggtgccgcggaaaggatagtgacagaatgggaaggattgaaattgatgaccaagcatccgtgatccatacttgaagcctgttcaatggcctcaaagcgtctactttcgaagtgtgttccccacctgcgtgggggtgaaccgtccaaaacacaggcggttagagacgcaaaactg

SEQ ID NO: 1117 - DNA, 103599 bp, Artificial Sequence
  Synthetic Oligonucleotide
  misc_feature (1)..(96571): n is a, c, g, or t
nnnnnnnnnnnnnnnnnnnnnnnnnnnnnnnnnnnnnnnnnnnnnnnnnnnnnnnnnnnnnnnnnnnnnnnnnnnnnnnnnnnnnnnnnnnnnnnnnnnnnnnnnnnnnnnnnnnnnnnnnnnnnnnnnnnnnnnnnnnnnnnnnnnnnnnnnnnnnnnnnnnnnnnnnnnnnnnnnnnnnnnnnnnnnnnnnnnnnnnnnnnnnnnnnnnnnnnnnnnnnnnnnnnnnnnnnnnnnnnnnnnnnnnnnnnnnnnnnnnnnnnnnnnnnnnnnnnnnnnnnnnnnnnnnnnnnnnnnnnnnnnnnnnnnnnnnnnnnnnnnnnnnnnnnnnnnnnnnnnnnnnnnnnnnnnnnnnnnnnnnnnnnnnnnnnnnnnnnnnnnnnnnnnnnnnnnnnnnnnnnnnnnnnnnnnnnnnnnnnnnnnnnnnnnnnnnnnnnnnnnnnnnnnnnnnnnnnnnnnnnnnnnnnnnnnnnnnnnnnnnnnnnnnnnnnnnnnnnnnnnnnnnnnnnnnnnnnnnnnnnnnnnnnnnnnnnnnnnnnnnnnnnnnnnnnnnnnnnnnnnnnnnnnnnnnnnnnnnnnnnnnnnnnnnnnnnnnnnnnnnnnnnnnnnnnnnnnnnnnnnnnnnnnnnnnnnnnnnnnnnnnnnnnnnnnnnnnnnnnnnnnnnnnnnnnnnnnnnnnnnnnnnnnnnnnnnnnnnnnnnnnnnnnnnnnnnnnnnnnnnnnnnnnnnnnnnnnnnnnnnnnnnnnnnnnnnnnnnnnnnnnnnnnnnnnnnnnnnnnnnnnnnnnnnnnnnnnnnnnnnnnnnnnnnnnnnnnnnnnnnnnnnnnnnnnnnnnnnnnnnnnnnnnnnnnnnnnnnnnnnnnnnnnnnnnnnnnnnnnnnnnnnnnnnnnnnnnnnnnnnnnnnnnnnnnnnnnnnnnnnnnnnnnnnnnnnnnnnnnnnnnnnnnnnnnnnnnnnnnnnnnnnnnnnnnnnnnnnnnnnnnnnnnnnnnnnnnnnnnnnnnnnnnnnnnnnnnnnnnnnnnnnnnnnnnnnnnnnnnnnnnnnnnnnnnnnnnnnnnnnnnnnnnnnnnnnnnnnnnnnnnnnnnnnnnnnnnnnnnnnnnnnnnnnnnnnnnnnnnnnnnnnnnnnnnnnnnnnnnnnnnnnnnnnnnnnnnnnnnnnnnnnnnnnnnnnnnnnnnnnnnnnnnnnnnnnnnnnnnnnnnnnnnnnnnnnnnnnnnnnnnnnnnnnnnnnnnnnnnnnnnnnnnnnnnnnnnnnnnnnnnnnnnnnnnnnnnnnnnnnnnnnnnnnnnnnnnnnnnnnnnnnnnnnnnnnnnnnnnnnnnnnnnnnnnnnnnnnnnnnnnnnnnnnnnnnnnnnnnnnnnnnnnnnnnnnnnnnnnnnnnnnnnnnnnnnnnnnnnnnnnnnnnnnnnnnnnnnnnnnnnnnnnnnnnnnnnnnnnnnnnnnnnnnnnnnnnnnnnnnnnnnnnnnnnnnnnnnnnnnnnnnnnnnnnnnnnnnnnnnnnnnnnnnnnnnnnnnnnnnnnnnnnnnnnnnnnnnnnnnnnnnnnnnnnnnnnnnnnnnnnnnnnnnnnnnnnnnnnnnnnnnnnnnnnnnnnnnnnnnnnnnnnnnnnnnnnnnnnnnnnnnnnnnnnnnnnnnnnnnnnnnnnnnnnnnnnnnnnnnnnnnnnnnnnnnnnnnnnnnnnnnnnnnnnnnnnnnnnnnnnnnnnnnnnnnnnnnnnnnnnnnnnnnnnnnnnnnnnnnnnnnnnnnnnnnnnnnnnnnnnnnnnnnnnnnnnnnnnnnnnnnnnnnnnnnnnnnnnnnnnnnnnnnnnnnnnnnnnnnnnnnnnnnnnnnnnnnnnnnnnnnnnnnnnnnnnnnnnnnnnnnnnnnnnnnnnnnnnnnnnnnnnnnnnnnnnnnnnnnnnnnnnnnnnnnnnnnnnnnnnnnnnnnnnnnnnnnnnnnnnnnnnnnnnnnnnnnnnnnnnnnnnnnnnnnnnnnnnnnnnnnnnnnnnnnnnnnnnnnnnnnnnnnnnnnnnnnnnnnnnnnnnnnnnnnnnnnnnnnnnnnnnnnnnnnnnnnnnnnnnnnnnnnnnnnnnnnnnnnnnnnnnnnnnnnnnnnnnnnnnnnnnnnnnnnnnnnnnnnnnnnnnnnnnnnnnnnnnnnnnnnnnnnnnnnnnnnnnnnnnnnnnnnnnnnnnnnnnnnnnnnnnnnnnnnnnnnnnnnnnnnnnnnnnnnnnnnnnnnnnnnnnnnnnnnnnnnnnnnnnnnnnnnnnnnnnnnnnnnnnnnnnnnnnnnnnnnnnnnnnnnnnnnnnnnnnnnnnnnnnnnnnnnnnnnnnnnnnnnnnnnnnnnnnnnnnnnnnnnnnnnnnnnnnnnnnnnnnnnnnnnnnnnnnnnnnnnnnnnnnnnnnnnnnnnnnnnnnnnnnnnnnnnnnnnnnnnnnnnnnnnnnnnnnnnnnnnnnnnnnnnnnnnnnnnnnnnnnnnnnnnnnnnnnnnnnnnnnnnnnnnnnnnnnnnnnnnnnnnnnnnnnnnnnnnnnnnnnnnnnnnnnnnnnnnnnnnnnnnnnnnnnnnnnnnnnnnnnnnnnnnnnnnnnnnnnnnnnnnnnnnnnnnnnnnnnnnnnnnnnnnnnnnnnnnnnnnnnnnnnnnnnnnnnnnnnnnnnnnnnnnnnnnnnnnnnnnnnnnnnnnnnnnnnnnnnnnnnnnnnnnnnnnnnnnnnnnnnnnnnnnnnnnnnnnnnnnnnnnnnnnnnnnnnnnnnnnnnnnnnnnnnnnnnnnnnnnnnnnnnnnnnnnnnnnnnnnnnnnnnnnnnnnnnnnnnnnnnnnnnnnnnnnnnnnnnnnnnnnnnnnnnnnnnnnnnnnnnnnnnnnnnnnnnnnnnnnnnnnnnnnnnnnnnnnnnnnnnnnnnnnnnnnnnnnnnnnnnnnnnnnnnnnnnnnnnnnnnnnnnnnnnnnnnnnnnnnnnnnnnnnnnnnnnnnnnnnnnnnnnnnnnnnnnnnnnnnnnnnnnnnnnnnnnnnnnnnnnnnnnnnnnnnnnnnnnnnnnnnnnnnnnnnnnnnnnnnnnnnnnnnnnnnnnnnnnnnnnnnnnnnnnnnnnnnnnnnnnnnnnnnnnnnnnnnnnnnnnnnnnnnnnnnnnnnnnnnnnnnnnnnnnnnnnnnnnnnnnnnnnnnnnnnnnnnnnnnnnnnnnnnnnnnnnnnnnnnnnnnnnnnnnnnnnnnnnnnnnnnnnnnnnnnnnnnnnnnnnnnnnnnnnnnnnnnnnnnnnnnnnnnnnnnnnnnnnnnnnnnnnnnnnnnnnnnnnnnnnnnnnnnnnnnnnnnnnnnnnnnnnnnnnnnnnnnnnnnnnnnnnnnnnnnnnnnnnnnnnnnnnnnnnnnnnnnnnnnnnnnnnnnnnnnnnnnnnnnnnnnnnnnnnnnnnnnnnnnnnnnnnnnnnnnnnnnnnnnnnnnnnnnnnnnnnnnnnnnnnnnnnnnnnnnnnnnnnnnnnnnnnnnnnnnnnnnnnnnnnnnnnnnnnnnnnnnnnnnnnnnnnnnnnnnnnnnnnnnnnnnnnnnnnnnnnnnnnnnnnnnnnnnnnnnnnnnnnnnnnnnnnnnnnnnnnnnnnnnnnnnnnnnnnnnnnnnnnnnnnnnnnnnnnnnnnnnnnnnnnnnnnnnnnnnnnnnnnnnnnnnnnnnnnnnnnnnnnnnnnnnnnnnnnnnnnnnnnnnnnnnnnnnnnnnnnnnnnnnnnnnnnnnnnnnnnnnnnnnnnnnnnnnnnnnnnnnnnnnnnnnnnnnnnnnnnnnnnnnnnnnnnnnnnnnnnnnnnnnnnnnnnnnnnnnnnnnnnnnnnnnnnnnnnnnnnnnnnnnnnnnnnnnnnnnnnnnnnnnnnnnnnnnnnnnnnnnnnnnnnnnnnnnnnnnnnnnnnnnnnnnnnnnnnnnnnnnnnnnnnnnnnnnnnnnnnnnnnnnnnnnnnnnnnnnnnnnnnnnnnnnnnnnnnnnnnnnnnnnnnnnnnnnnnnnnnnnnnnnnnnnnnnnnnnnnnnnnnnnnnnnnnnnnnnnnnnnnnnnnnnnnnnnnnnnnnnnnnnnnnnnnnnnnnnnnnnnnnnnnnnnnnnnnnnnnnnnnnnnnnnnnnnnnnnnnnnnnnnnnnnnnnnnnnnnnnnnnnnnnnnnnnnnnnnnnnnnnnnnnnnnnnnnnnnnnnnnnnnnnnnnnnnnnnnnnnnnnnnnnnnnnnnnnnnnnnnnnnnnnnnnnnnnnnnnnnnnnnnnnnnnnnnnnnnnnnnnnnnnnnnnnnnnnnnnnnnnnnnnnnnnnnnnnnnnnnnnnnnnnnnnnnnnnnnnnnnnnnnnnnnnnnnnnnnnnnnnnnnnnnnnnnnnnnnnnnnnnnnnnnnnnnnnnnnnnnnnnnnnnnnnnnnnnnnnnnnnnnnnnnnnnnnnnnnnnnnnnnnnnnnnnnnnnnnnnnnnnnnnnnnnnnnnnnnnnnnnnnnnnnnnnnnnnnnnnnnnnnnnnnnnnnnnnnnnnnnnnnnnnnnnnnnnnnnnnnnnnnnnnnnnnnnnnnnnnnnnnnnnnnnnnnnnnnnnnnnnnnnnnnnnnnnnnnnnnnnnnnnnnnnnnnnnnnnnnnnnnnnnnnnnnnnnnnnnnnnnnnnnnnnnnnnnnnnnnnnnnnnnnnnnnnnnnnnnnnnnnnnnnnnnnnnnnnnnnnnnnnnnnnnnnnnnnnnnnnnnnnnnnnnnnnnnnnnnnnnnnnnnnnnnnnnnnnnnnnnnnnnnnnnnnnnnnnnnnnnnnnnnnnnnnnnnnnnnnnnnnnnnnnnnnnnnnnnnnnnnnnnnnnnnnnnnnnnnnnnnnnnnnnnnnnnnnnnnnnnnnnnnnnnnnnnnnnnnnnnnnnnnnnnnnnnnnnnnnnnnnnnnnnnnnnnnnnnnnnnnnnnnnnnnnnnnnnnnnnnnnnnnnnnnnnnnnnnnnnnnnnnnnnnnnnnnnnnnnnnnnnnnnnnnnnnnnnnnnnnnnnnnnnnnnnnnnnnnnnnnnnnnnnnnnnnnnnnnnnnnnnnnnnnnnnnnnnnnnnnnnnnnnnnnnnnnnnnnnnnnnnnnnnnnnnnnnnnnnnnnnnnnnnnnnnnnnnnnnnnnnnnnnnnnnnnnnnnnnnnnnnnnnnnnnnnnnnnnnnnnnnnnnnnnnnnnnnnnnnnnnnnnnnnnnnnnnnnnnnnnnnnnnnnnnnnnnnnnnnnnnnnnnnnnnnnnnnnnnnnnnnnnnnnnnnnnnnnnnnnnnnnnnnnnnnnnnnnnnnnnnnnnnnnnnnnnnnnnnnnnnnnnnnnnnnnnnnnnnnnnnnnnnnnnnnnnnnnnnnnnnnnnnnnnnnnnnnnnnnnnnnnnnnnnnnnnnnnnnnnnnnnnnnnnnnnnnnnnnnnnnnnnnnnnnnnnnnnnnnnnnnnnnnnnnnnnnnnnnnnnnnnnnnnnnnnnnnnnnnnnnnnnnnnnnnnnnnnnnnnnnnnnnnnnnnnnnnnnnnnnnnnnnnnnnnnnnnnnnnnnnnnnnnnnnnnnnnnnnnnnnnnnnnnnnnnnnnnnnnnnnnnnnnnnnnnnnnnnnnnnnnnnnnnnnnnnnnnnnnnnnnnnnnnnnnnnnnnnnnnnnnnnnnnnnnnnnnnnnnnnnnnnnnnnnnnnnnnnnnnnnnnnnnnnnnnnnnnnnnnnnnnnnnnnnnnnnnnnnnnnnnnnnnnnnnnnnnnnnnnnnnnnnnnnnnnnnnnnnnnnnnnnnnnnnnnnnnnnnnnnnnnnnnnnnnnnnnnnnnnnnnnnnnnnnnnnnnnnnnnnnnnnnnnnnnnnnnnnnnnnnnnnnnnnnnnnnnnnnnnnnnnnnnnnnnnnnnnnnnnnnnnnnnnnnnnnnnnnnnnnnnnnnnnnnnnnnnnnnnnnnnnnnnnnnnnnnnnnnnnnnnnnnnnnnnnnnnnnnnnnnnnnnnnnnnnnnnnnnnnnnnnnnnnnnnnnnnnnnnnnnnnnnnnnnnnnnnnnnnnnnnnnnnnnnnnnnnnnnnnnnnnnnnnnnnnnnnnnnnnnnnnnnnnnnnnnnnnnnnnnnnnnnnnnnnnnnnnnnnnnnnnnnnnnnnnnnnnnnnnnnnnnnnnnnnnnnnnnnnnnnnnnnnnnnnnnnnnnnnnnnnnnnnnnnnnnnnnnnnnnnnnnnnnnnnnnnnnnnnnnnnnnnnnnnnnnnnnnnnnnnnnnnnnnnnnnnnnnnnnnnnnnnnnnnnnnnnnnnnnnnnnnnnnnnnnnnnnnnnnnnnnnnnnnnnnnnnnnnnnnnnnnnnnnnnnnnnnnnnnnnnnnnnnnnnnnnnnnnnnnnnnnnnnnnnnnnnnnnnnnnnnnnnnnnnnnnnnnnnnnnnnnnnnnnnnnnnnnnnnnnnnnnnnnnnnnnnnnnnnnnnnnnnnnnnnnnnnnnnnnnnnnnnnnnnnnnnnnnnnnnnnnnnnnnnnnnnnnnnnnnnnnnnnnnnnnnnnnnnnnnnnnnnnnnnnnnnnnnnnnnnnnnnnnnnnnnnnnnnnnnnnnnnnnnnnnnnnnnnnnnnnnnnnnnnnnnnnnnnnnnnnnnnnnnnnnnnnnnnnnnnnnnnnnnnnnnnnnnnnnnnnnnnnnnnnnnnnnnnnnnnnnnnnnnnnnnnnnnnnnnnnnnnnnnnnnnnnnnnnnnnnnnnnnnnnnnnnnnnnnnnnnnnnnnnnnnnnnnnnnnnnnnnnnnnnnnnnnnnnnnnnnnnnnnnnnnnnnnnnnnnnnnnnnnnnnnnnnnnnnnnnnnnnnnnnnnnnnnnnnnnnnnnnnnnnnnnnnnnnnnnnnnnnnnnnnnnnnnnnnnnnnnnnnnnnnnnnnnnnnnnnnnnnnnnnnnnnnnnnnnnnnnnnnnnnnnnnnnnnnnnnnnnnnnnnnnnnnnnnnnnnnnnnnnnnnnnnnnnnnnnnnnnnnnnnnnnnnnnnnnnnnnnnnnnnnnnnnnnnnnnnnnnnnnnnnnnnnnnnnnnnnnnnnnnnnnnnnnnnnnnnnnnnnnnnnnnnnnnnnnnnnnnnnnnnnnnnnnnnnnnnnnnnnnnnnnnnnnnnnnnnnnnnnnnnnnnnnnnnnnnnnnnnnnnnnnnnnnnnnnnnnnnnnnnnnnnnnnnnnnnnnnnnnnnnnnnnnnnnnnnnnnnnnnnnnnnnnnnnnnnnnnnnnnnnnnnnnnnnnnnnnnnnnnnnnnnnnnnnnnnnnnnnnnnnnnnnnnnnnnnnnnnnnnnnnnnnnnnnnnnnnnnnnnnnnnnnnnnnnnnnnnnnnnnnnnnnnnnnnnnnnnnnnnnnnnnnnnnnnnnnnnnnnnnnnnnnnnnnnnnnnnnnnnnnnnnnnnnnnnnnnnnnnnnnnnnnnnnnnnnnnnnnnnnnnnnnnnnnnnnnnnnnnnnnnnnnnnnnnnnnnnnnnnnnnnnnnnnnnnnnnnnnnnnnnnnnnnnnnnnnnnnnnnnnnnnnnnnnnnnnnnnnnnnnnnnnnnnnnnnnnnnnnnnnnnnnnnnnnnnnnnnnnnnnnnnnnnnnnnnnnnnnnnnnnnnnnnnnnnnnnnnnnnnnnnnnnnnnnnnnnnnnnnnnnnnnnnnnnnnnnnnnnnnnnnnnnnnnnnnnnnnnnnnnnnnnnnnnnnnnnnnnnnnnnnnnnnnnnnnnnnnnnnnnnnnnnnnnnnnnnnnnnnnnnnnnnnnnnnnnnnnnnnnnnnnnnnnnnnnnnnnnnnnnnnnnnnnnnnnnnnnnnnnnnnnnnnnnnnnnnnnnnnnnnnnnnnnnnnnnnnnnnnnnnnnnnnnnnnnnnnnnnnnnnnnnnnnnnnnnnnnnnnnnnnnnnnnnnnnnnnnnnnnnnnnnnnnnnnnnnnnnnnnnnnnnnnnnnnnnnnnnnnnnnnnnnnnnnnnnnnnnnnnnnnnnnnnnnnnnnnnnnnnnnnnnnnnnnnnnnnnnnnnnnnnnnnnnnnnnnnnnnnnnnnnnnnnnnnnnnnnnnnnnnnnnnnnnnnnnnnnnnnnnnnnnnnnnnnnnnnnnnnnnnnnnnnnnnnnnnnnnnnnnnnnnnnnnnnnnnnnnnnnnnnnnnnnnnnnnnnnnnnnnnnnnnnnnnnnnnnnnnnnnnnnnnnnnnnnnnnnnnnnnnnnnnnnnnnnnnnnnnnnnnnnnnnnnnnnnnnnnnnnnnnnnnnnnnnnnnnnnnnnnnnnnnnnnnnnnnnnnnnnnnnnnnnnnnnnnnnnnnnnnnnnnnnnnnnnnnnnnnnnnnnnnnnnnnnnnnnnnnnnnnnnnnnnnnnnnnnnnnnnnnnnnnnnnnnnnnnnnnnnnnnnnnnnnnnnnnnnnnnnnnnnnnnnnnnnnnnnnnnnnnnnnnnnnnnnnnnnnnnnnnnnnnnnnnnnnnnnnnnnnnnnnnnnnnnnnnnnnnnnnnnnnnnnnnnnnnnnnnnnnnnnnnnnnnnnnnnnnnnnnnnnnnnnnnnnnnnnnnnnnnnnnnnnnnnnnnnnnnnnnnnnnnnnnnnnnnnnnnnnnnnnnnnnnnnnnnnnnnnnnnnnnnnnnnnnnnnnnnnnnnnnnnnnnnnnnnnnnnnnnnnnnnnnnnnnnnnnnnnnnnnnnnnnnnnnnnnnnnnnnnnnnnnnnnnnnnnnnnnnnnnnnnnnnnnnnnnnnnnnnnnnnnnnnnnnnnnnnnnnnnnnnnnnnnnnnnnnnnnnnnnnnnnnnnnnnnnnnnnnnnnnnnnnnnnnnnnnnnnnnnnnnnnnnnnnnnnnnnnnnnnnnnnnnnnnnnnnnnnnnnnnnnnnnnnnnnnnnnnnnnnnnnnnnnnnnnnnnnnnnnnnnnnnnnnnnnnnnnnnnnnnnnnnnnnnnnnnnnnnnnnnnnnnnnnnnnnnnnnnnnnnnnnnnnnnnnnnnnnnnnnnnnnnnnnnnnnnnnnnnnnnnnnnnnnnnnnnnnnnnnnnnnnnnnnnnnnnnnnnnnnnnnnnnnnnnnnnnnnnnnnnnnnnnnnnnnnnnnnnnnnnnnnnnnnnnnnnnnnnnnnnnnnnnnnnnnnnnnnnnnnnnnnnnnnnnnnnnnnnnnnnnnnnnnnnnnnnnnnnnnnnnnnnnnnnnnnnnnnnnnnnnnnnnnnnnnnnnnnnnnnnnnnnnnnnnnnnnnnnnnnnnnnnnnnnnnnnnnnnnnnnnnnnnnnnnnnnnnnnnnnnnnnnnnnnnnnnnnnnnnnnnnnnnnnnnnnnnnnnnnnnnnnnnnnnnnnnnnnnnnnnnnnnnnnnnnnnnnnnnnnnnnnnnnnnnnnnnnnnnnnnnnnnnnnnnnnnnnnnnnnnnnnnnnnnnnnnnnnnnnnnnnnnnnnnnnnnnnnnnnnnnnnnnnnnnnnnnnnnnnnnnnnnnnnnnnnnnnnnnnnnnnnnnnnnnnnnnnnnnnnnnnnnnnnnnnnnnnnnnnnnnnnnnnnnnnnnnnnnnnnnnnnnnnnnnnnnnnnnnnnnnnnnnnnnnnnnnnnnnnnnnnnnnnnnnnnnnnnnnnnnnnnnnnnnnnnnnnnnnnnnnnnnnnnnnnnnnnnnnnnnnnnnnnnnnnnnnnnnnnnnnnnnnnnnnnnnnnnnnnnnnnnnnnnnnnnnnnnnnnnnnnnnnnnnnnnnnnnnnnnnnnnnnnnnnnnnnnnnnnnnnnnnnnnnnnnnnnnnnnnnnnnnnnnnnnnnnnnnnnnnnnnnnnnnnnnnnnnnnnnnnnnnnnnnnnnnnnnnnnnnnnnnnnnnnnnnnnnnnnnnnnnnnnnnnnnnnnnnnnnnnnnnnnnnnnnnnnnnnnnnnnnnnnnnnnnnnnnnnnnnnnnnnnnnnnnnnnnnnnnnnnnnnnnnnnnnnnnnnnnnnnnnnnnnnnnnnnnnnnnnnnnnnnnnnnnnnnnnnnnnnnnnnnnnnnnnnnnnnnnnnnnnnnnnnnnnnnnnnnnnnnnnnnnnnnnnnnnnnnnnnnnnnnnnnnnnnnnnnnnnnnnnnnnnnnnnnnnnnnnnnnnnnnnnnnnnnnnnnnnnnnnnnnnnnnnnnnnnnnnnnnnnnnnnnnnnnnnnnnnnnnnnnnnnnnnnnnnnnnnnnnnnnnnnnnnnnnnnnnnnnnnnnnnnnnnnnnnnnnnnnnnnnnnnnnnnnnnnnnnnnnnnnnnnnnnnnnnnnnnnnnnnnnnnnnnnnnnnnnnnnnnnnnnnnnnnnnnnnnnnnnnnnnnnnnnnnnnnnnnnnnnnnnnnnnnnnnnnnnnnnnnnnnnnnnnnnnnnnnnnnnnnnnnnnnnnnnnnnnnnnnnnnnnnnnnnnnnnnnnnnnnnnnnnnnnnnnnnnnnnnnnnnnnnnnnnnnnnnnnnnnnnnnnnnnnnnnnnnnnnnnnnnnnnnnnnnnnnnnnnnnnnnnnnnnnnnnnnnnnnnnnnnnnnnnnnnnnnnnnnnnnnnnnnnnnnnnnnnnnnnnnnnnnnnnnnnnnnnnnnnnnnnnnnnnnnnnnnnnnnnnnnnnnnnnnnnnnnnnnnnnnnnnnnnnnnnnnnnnnnnnnnnnnnnnnnnnnnnnnnnnnnnnnnnnnnnnnnnnnnnnnnnnnnnnnnnnnnnnnnnnnnnnnnnnnnnnnnnnnnnnnnnnnnnnnnnnnnnnnnnnnnnnnnnnnnnnnnnnnnnnnnnnnnnnnnnnnnnnnnnnnnnnnnnnnnnnnnnnnnnnnnnnnnnnnnnnnnnnnnnnnnnnnnnnnnnnnnnnnnnnnnnnnnnnnnnnnnnnnnnnnnnnnnnnnnnnnnnnnnnnnnnnnnnnnnnnnnnnnnnnnnnnnnnnnnnnnnnnnnnnnnnnnnnnnnnnnnnnnnnnnnnnnnnnnnnnnnnnnnnnnnnnnnnnnnnnnnnnnnnnnnnnnnnnnnnnnnnnnnnnnnnnnnnnnnnnnnnnnnnnnnnnnnnnnnnnnnnnnnnnnnnnnnnnnnnnnnnnnnnnnnnnnnnnnnnnnnnnnnnnnnnnnnnnnnnnnnnnnnnnnnnnnnnnnnnnnnnnnnnnnnnnnnnnnnnnnnnnnnnnnnnnnnnnnnnnnnnnnnnnnnnnnnnnnnnnnnnnnnnnnnnnnnnnnnnnnnnnnnnnnnnnnnnnnnnnnnnnnnnnnnnnnnnnnnnnnnnnnnnnnnnnnnnnnnnnnnnnnnnnnnnnnnnnnnnnnnnnnnnnnnnnnnnnnnnnnnnnnnnnnnnnnnnnnnnnnnnnnnnnnnnnnnnnnnnnnnnnnnnnnnnnnnnnnnnnnnnnnnnnnnnnnnnnnnnnnnnnnnnnnnnnnnnnnnnnnnnnnnnnnnnnnnnnnnnnnnnnnnnnnnnnnnnnnnnnnnnnnnnnnnnnnnnnnnnnnnnnnnnnnnnnnnnnnnnnnnnnnnnnnnnnnnnnnnnnnnnnnnnnnnnnnnnnnnnnnnnnnnnnnnnnnnnnnnnnnnnnnnnnnnnnnnnnnnnnnnnnnnnnnnnnnnnnnnnnnnnnnnnnnnnnnnnnnnnnnnnnnnnnnnnnnnnnnnnnnnnnnnnnnnnnnnnnnnnnnnnnnnnnnnnnnnnnnnnnnnnnnnnnnnnnnnnnnnnnnnnnnnnnnnnnnnnnnnnnnnnnnnnnnnnnnnnnnnnnnnnnnnnnnnnnnnnnnnnnnnnnnnnnnnnnnnnnnnnnnnnnnnnnnnnnnnnnnnnnnnnnnnnnnnnnnnnnnnnnnnnnnnnnnnnnnnnnnnnnnnnnnnnnnnnnnnnnnnnnnnnnnnnnnnnnnnnnnnnnnnnnnnnnnnnnnnnnnnnnnnnnnnnnnnnnnnnnnnnnnnnnnnnnnnnnnnnnnnnnnnnnnnnnnnnnnnnnnnnnnnnnnnnnnnnnnnnnnnnnnnnnnnnnnnnnnnnnnnnnnnnnnnnnnnnnnnnnnnnnnnnnnnnnnnnnnnnnnnnnnnnnnnnnnnnnnnnnnnnnnnnnnnnnnnnnnnnnnnnnnnnnnnnnnnnnnnnnnnnnnnnnnnnnnnnnnnnnnnnnnnnnnnnnnnnnnnnnnnnnnnnnnnnnnnnnnnnnnnnnnnnnnnnnnnnnnnnnnnnnnnnnnnnnnnnnnnnnnnnnnnnnnnnnnnnnnnnnnnnnnnnnnnnnnnnnnnnnnnnnnnnnnnnnnnnnnnnnnnnnnnnnnnnnnnnnnnnnnnnnnnnnnnnnnnnnnnnnnnnnnnnnnnnnnnnnnnnnnnnnnnnnnnnnnnnnnnnnnnnnnnnnnnnnnnnnnnnnnnnnnnnnnnnnnnnnnnnnnnnnnnnnnnnnnnnnnnnnnnnnnnnnnnnnnnnnnnnnnnnnnnnnnnnnnnnnnnnnnnnnnnnnnnnnnnnnnnnnnnnnnnnnnnnnnnnnnnnnnnnnnnnnnnnnnnnnnnnnnnnnnnnnnnnnnnnnnnnnnnnnnnnnnnnnnnnnnnnnnnnnnnnnnnnnnnnnnnnnnnnnnnnnnnnnnnnnnnnnnnnnnnnnnnnnnnnnnnnnnnnnnnnnnnnnnnnnnnnnnnnnnnnnnnnnnnnnnnnnnnnnnnnnnnnnnnnnnnnnnnnnnnnnnnnnnnnnnnnnnnnnnnnnnnnnnnnnnnnnnnnnnnnnnnnnnnnnnnnnnnnnnnnnnnnnnnnnnnnnnnnnnnnnnnnnnnnnnnnnnnnnnnnnnnnnnnnnnnnnnnnnnnnnnnnnnnnnnnnnnnnnnnnnnnnnnnnnnnnnnnnnnnnnnnnnnnnnnnnnnnnnnnnnnnnnnnnnnnnnnnnnnnnnnnnnnnnnnnnnnnnnnnnnnnnnnnnnnnnnnnnnnnnnnnnnnnnnnnnnnnnnnnnnnnnnnnnnnnnnnnnnnnnnnnnnnnnnnnnnnnnnnnnnnnnnnnnnnnnnnnnnnnnnnnnnnnnnnnnnnnnnnnnnnnnnnnnnnnnnnnnnnnnnnnnnnnnnnnnnnnnnnnnnnnnnnnnnnnnnnnnnnnnnnnnnnnnnnnnnnnnnnnnnnnnnnnnnnnnnnnnnnnnnnnnnnnnnnnnnnnnnnnnnnnnnnnnnnnnnnnnnnnnnnnnnnnnnnnnnnnnnnnnnnnnnnnnnnnnnnnnnnnnnnnnnnnnnnnnnnnnnnnnnnnnnnnnnnnnnnnnnnnnnnnnnnnnnnnnnnnnnnnnnnnnnnnnnnnnnnnnnnnnnnnnnnnnnnnnnnnnnnnnnnnnnnnnnnnnnnnnnnnnnnnnnnnnnnnnnnnnnnnnnnnnnnnnnnnnnnnnnnnnnnnnnnnnnnnnnnnnnnnnnnnnnnnnnnnnnnnnnnnnnnnnnnnnnnnnnnnnnnnnnnnnnnnnnnnnnnnnnnnnnnnnnnnnnnnnnnnnnnnnnnnnnnnnnnnnnnnnnnnnnnnnnnnnnnnnnnnnnnnnnnnnnnnnnnnnnnnnnnnnnnnnnnnnnnnnnnnnnnnnnnnnnnnnnnnnnnnnnnnnnnnnnnnnnnnnnnnnnnnnnnnnnnnnnnnnnnnnnnnnnnnnnnnnnnnnnnnnnnnnnnnnnnnnnnnnnnnnnnnnnnnnnnnnnnnnnnnnnnnnnnnnnnnnnnnnnnnnnnnnnnnnnnnnnnnnnnnnnnnnnnnnnnnnnnnnnnnnnnnnnnnnnnnnnnnnnnnnnnnnnnnnnnnnnnnnnnnnnnnnnnnnnnnnnnnnnnnnnnnnnnnnnnnnnnnnnnnnnnnnnnnnnnnnnnnnnnnnnnnnnnnnnnnnnnnnnnnnnnnnnnnnnnnnnnnnnnnnnnnnnnnnnnnnnnnnnnnnnnnnnnnnnnnnnnnnnnnnnnnnnnnnnnnnnnnnnnnnnnnnnnnnnnnnnnnnnnnnnnnnnnnnnnnnnnnnnnnnnnnnnnnnnnnnnnnnnnnnnnnnnnnnnnnnnnnnnnnnnnnnnnnnnnnnnnnnnnnnnnnnnnnnnnnnnnnnnnnnnnnnnnnnnnnnnnnnnnnnnnnnnnnnnnnnnnnnnnnnnnnnnnnnnnnnnnnnnnnnnnnnnnnnnnnnnnnnnnnnnnnnnnnnnnnnnnnnnnnnnnnnnnnnnnnnnnnnnnnnnnnnnnnnnnnnnnnnnnnnnnnnnnnnnnnnnnnnnnnnnnnnnnnnnnnnnnnnnnnnnnnnnnnnnnnnnnnnnnnnnnnnnnnnnnnnnnnnnnnnnnnnnnnnnnnnnnnnnnnnnnnnnnnnnnnnnnnnnnnnnnnnnnnnnnnnnnnnnnnnnnnnnnnnnnnnnnnnnnnnnnnnnnnnnnnnnnnnnnnnnnnnnnnnnnnnnnnnnnnnnnnnnnnnnnnnnnnnnnnnnnnnnnnnnnnnnnnnnnnnnnnnnnnnnnnnnnnnnnnnnnnnnnnnnnnnnnnnnnnnnnnnnnnnnnnnnnnnnnnnnnnnnnnnnnnnnnnnnnnnnnnnnnnnnnnnnnnnnnnnnnnnnnnnnnnnnnnnnnnnnnnnnnnnnnnnnnnnnnnnnnnnnnnnnnnnnnnnnnnnnnnnnnnnnnnnnnnnnnnnnnnnnnnnnnnnnnnnnnnnnnnnnnnnnnnnnnnnnnnnnnnnnnnnnnnnnnnnnnnnnnnnnnnnnnnnnnnnnnnnnnnnnnnnnnnnnnnnnnnnnnnnnnnnnnnnnnnnnnnnnnnnnnnnnnnnnnnnnnnnnnnnnnnnnnnnnnnnnnnnnnnnnnnnnnnnnnnnnnnnnnnnnnnnnnnnnnnnnnnnnnnnnnnnnnnnnnnnnnnnnnnnnnnnnnnnnnnnnnnnnnnnnnnnnnnnnnnnnnnnnnnnnnnnnnnnnnnnnnnnnnnnnnnnnnnnnnnnnnnnnnnnnnnnnnnnnnnnnnnnnnnnnnnnnnnnnnnnnnnnnnnnnnnnnnnnnnnnnnnnnnnnnnnnnnnnnnnnnnnnnnnnnnnnnnnnnnnnnnnnnnnnnnnnnnnnnnnnnnnnnnnnnnnnnnnnnnnnnnnnnnnnnnnnnnnnnnnnnnnnnnnnnnnnnnnnnnnnnnnnnnnnnnnnnnnnnnnnnnnnnnnnnnnnnnnnnnnnnnnnnnnnnnnnnnnnnnnnnnnnnnnnnnnnnnnnnnnnnnnnnnnnnnnnnnnnnnnnnnnnnnnnnnnnnnnnnnnnnnnnnnnnnnnnnnnnnnnnnnnnnnnnnnnnnnnnnnnnnnnnnnnnnnnnnnnnnnnnnnnnnnnnnnnnnnnnnnnnnnnnnnnnnnnnnnnnnnnnnnnnnnnnnnnnnnnnnnnnnnnnnnnnnnnnnnnnnnnnnnnnnnnnnnnnnnnnnnnnnnnnnnnnnnnnnnnnnnnnnnnnnnnnnnnnnnnnnnnnnnnnnnnnnnnnnnnnnnnnnnnnnnnnnnnnnnnnnnnnnnnnnnnnnnnnnnnnnnnnnnnnnnnnnnnnnnnnnnnnnnnnnnnnnnnnnnnnnnnnnnnnnnnnnnnnnnnnnnnnnnnnnnnnnnnnnnnnnnnnnnnnnnnnnnnnnnnnnnnnnnnnnnnnnnnnnnnnnnnnnnnnnnnnnnnnnnnnnnnnnnnnnnnnnnnnnnnnnnnnnnnnnnnnnnnnnnnnnnnnnnnnnnnnnnnnnnnnnnnnnnnnnnnnnnnnnnnnnnnnnnnnnnnnnnnnnnnnnnnnnnnnnnnnnnnnnnnnnnnnnnnnnnnnnnnnnnnnnnnnnnnnnnnnnnnnnnnnnnnnnnnnnnnnnnnnnnnnnnnnnnnnnnnnnnnnnnnnnnnnnnnnnnnnnnnnnnnnnnnnnnnnnnnnnnnnnnnnnnnnnnnnnnnnnnnnnnnnnnnnnnnnnnnnnnnnnnnnnnnnnnnnnnnnnnnnnnnnnnnnnnnnnnnnnnnnnnnnnnnnnnnnnnnnnnnnnnnnnnnnnnnnnnnnnnnnnnnnnnnnnnnnnnnnnnnnnnnnnnnnnnnnnnnnnnnnnnnnnnnnnnnnnnnnnnnnnnnnnnnnnnnnnnnnnnnnnnnnnnnnnnnnnnnnnnnnnnnnnnnnnnnnnnnnnnnnnnnnnnnnnnnnnnnnnnnnnnnnnnnnnnnnnnnnnnnnnnnnnnnnnnnnnnnnnnnnnnnnnnnnnnnnnnnnnnnnnnnnnnnnnnnnnnnnnnnnnnnnnnnnnnnnnnnnnnnnnnnnnnnnnnnnnnnnnnnnnnnnnnnnnnnnnnnnnnnnnnnnnnnnnnnnnnnnnnnnnnnnnnnnnnnnnnnnnnnnnnnnnnnnnnnnnnnnnnnnnnnnnnnnnnnnnnnnnnnnnnnnnnnnnnnnnnnnnnnnnnnnnnnnnnnnnnnnnnnnnnnnnnnnnnnnnnnnnnnnnnnnnnnnnnnnnnnnnnnnnnnnnnnnnnnnnnnnnnnnnnnnnnnnnnnnnnnnnnnnnnnnnnnnnnnnnnnnnnnnnnnnnnnnnnnnnnnnnnnnnnnnnnnnnnnnnnnnnnnnnnnnnnnnnnnnnnnnnnnnnnnnnnnnnnnnnnnnnnnnnnnnnnnnnnnnnnnnnnnnnnnnnnnnnnnnnnnnnnnnnnnnnnnnnnnnnnnnnnnnnnnnnnnnnnnnnnnnnnnnnnnnnnnnnnnnnnnnnnnnnnnnnnnnnnnnnnnnnnnnnnnnnnnnnnnnnnnnnnnnnnnnnnnnnnnnnnnnnnnnnnnnnnnnnnnnnnnnnnnnnnnnnnnnnnnnnnnnnnnnnnnnnnnnnnnnnnnnnnnnnnnnnnnnnnnnnnnnnnnnnnnnnnnnnnnnnnnnnnnnnnnnnnnnnnnnnnnnnnnnnnnnnnnnnnnnnnnnnnnnnnnnnnnnnnnnnnnnnnnnnnnnnnnnnnnnnnnnnnnnnnnnnnnnnnnnnnnnnnnnnnnnnnnnnnnnnnnnnnnnnnnnnnnnnnnnnnnnnnnnnnnnnnnnnnnnnnnnnnnnnnnnnnnnnnnnnnnnnnnnnnnnnnnnnnnnnnnnnnnnnnnnnnnnnnnnnnnnnnnnnnnnnnnnnnnnnnnnnnnnnnnnnnnnnnnnnnnnnnnnnnnnnnnnnnnnnnnnnnnnnnnnnnnnnnnnnnnnnnnnnnnnnnnnnnnnnnnnnnnnnnnnnnnnnnnnnnnnnnnnnnnnnnnnnnnnnnnnnnnnnnnnnnnnnnnnnnnnnnnnnnnnnnnnnnnnnnnnnnnnnnnnnnnnnnnnnnnnnnnnnnnnnnnnnnnnnnnnnnnnnnnnnnnnnnnnnnnnnnnnnnnnnnnnnnnnnnnnnnnnnnnnnnnnnnnnnnnnnnnnnnnnnnnnnnnnnnnnnnnnnnnnnnnnnnnnnnnnnnnnnnnnnnnnnnnnnnnnnnnnnnnnnnnnnnnnnnnnnnnnnnnnnnnnnnnnnnnnnnnnnnnnnnnnnnnnnnnnnnnnnnnnnnnnnnnnnnnnnnnnnnnnnnnnnnnnnnnnnnnnnnnnnnnnnnnnnnnnnnnnnnnnnnnnnnnnnnnnnnnnnnnnnnnnnnnnnnnnnnnnnnnnnnnnnnnnnnnnnnnnnnnnnnnnnnnnnnnnnnnnnnnnnnnnnnnnnnnnnnnnnnnnnnnnnnnnnnnnnnnnnnnnnnnnnnnnnnnnnnnnnnnnnnnnnnnnnnnnnnnnnnnnnnnnnnnnnnnnnnnnnnnnnnnnnnnnnnnnnnnnnnnnnnnnnnnnnnnnnnnnnnnnnnnnnnnnnnnnnnnnnnnnnnnnnnnnnnnnnnnnnnnnnnnnnnnnnnnnnnnnnnnnnnnnnnnnnnnnnnnnnnnnnnnnnnnnnnnnnnnnnnnnnnnnnnnnnnnnnnnnnnnnnnnnnnnnnnnnnnnnnnnnnnnnnnnnnnnnnnnnnnnnnnnnnnnnnnnnnnnnnnnnnnnnnnnnnnnnnnnnnnnnnnnnnnnnnnnnnnnnnnnnnnnnnnnnnnnnnnnnnnnnnnnnnnnnnnnnnnnnnnnnnnnnnnnnnnnnnnnnnnnnnnnnnnnnnnnnnnnnnnnnnnnnnnnnnnnnnnnnnnnnnnnnnnnnnnnnnnnnnnnnnnnnnnnnnnnnnnnnnnnnnnnnnnnnnnnnnnnnnnnnnnnnnnnnnnnnnnnnnnnnnnnnnnnnnnnnnnnnnnnnnnnnnnnnnnnnnnnnnnnnnnnnnnnnnnnnnnnnnnnnnnnnnnnnnnnnnnnnnnnnnnnnnnnnnnnnnnnnnnnnnnnnnnnnnnnnnnnnnnnnnnnnnnnnnnnnnnnnnnnnnnnnnnnnnnnnnnnnnnnnnnnnnnnnnnnnnnnnnnnnnnnnnnnnnnnnnnnnnnnnnnnnnnnnnnnnnnnnnnnnnnnnnnnnnnnnnnnnnnnnnnnnnnnnnnnnnnnnnnnnnnnnnnnnnnnnnnnnnnnnnnnnnnnnnnnnnnnnnnnnnnnnnnnnnnnnnnnnnnnnnnnnnnnnnnnnnnnnnnnnnnnnnnnnnnnnnnnnnnnnnnnnnnnnnnnnnnnnnnnnnnnnnnnnnnnnnnnnnnnnnnnnnnnnnnnnnnnnnnnnnnnnnnnnnnnnnnnnnnnnnnnnnnnnnnnnnnnnnnnnnnnnnnnnnnnnnnnnnnnnnnnnnnnnnnnnnnnnnnnnnnnnnnnnnnnnnnnnnnnnnnnnnnnnnnnnnnnnnnnnnnnnnnnnnnnnnnnnnnnnnnnnnnnnnnnnnnnnnnnnnnnnnnnnnnnnnnnnnnnnnnnnnnnnnnnnnnnnnnnnnnnnnnnnnnnnnnnnnnnnnnnnnnnnnnnnnnnnnnnnnnnnnnnnnnnnnnnnnnnnnnnnnnnnnnnnnnnnnnnnnnnnnnnnnnnnnnnnnnnnnnnnnnnnnnnnnnnnnnnnnnnnnnnnnnnnnnnnnnnnnnnnnnnnnnnnnnnnnnnnnnnnnnnnnnnnnnnnnnnnnnnnnnnnnnnnnnnnnnnnnnnnnnnnnnnnnnnnnnnnnnnnnnnnnnnnnnnnnnnnnnnnnnnnnnnnnnnnnnnnnnnnnnnnnnnnnnnnnnnnnnnnnnnnnnnnnnnnnnnnnnnnnnnnnnnnnnnnnnnnnnnnnnnnnnnnnnnnnnnnnnnnnnnnnnnnnnnnnnnnnnnnnnnnnnnnnnnnnnnnnnnnnnnnnnnnnnnnnnnnnnnnnnnnnnnnnnnnnnnnnnnnnnnnnnnnnnnnnnnnnnnnnnnnnnnnnnnnnnnnnnnnnnnnnnnnnnnnnnnnnnnnnnnnnnnnnnnnnnnnnnnnnnnnnnnnnnnnnnnnnnnnnnnnnnnnnnnnnnnnnnnnnnnnnnnnnnnnnnnnnnnnnnnnnnnnnnnnnnnnnnnnnnnnnnnnnnnnnnnnnnnnnnnnnnnnnnnnnnnnnnnnnnnnnnnnnnnnnnnnnnnnnnnnnnnnnnnnnnnnnnnnnnnnnnnnnnnnnnnnnnnnnnnnnnnnnnnnnnnnnnnnnnnnnnnnnnnnnnnnnnnnnnnnnnnnnnnnnnnnnnnnnnnnnnnnnnnnnnnnnnnnnnnnnnnnnnnnnnnnnnnnnnnnnnnnnnnnnnnnnnnnnnnnnnnnnnnnnnnnnnnnnnnnnnnnnnnnnnnnnnnnnnnnnnnnnnnnnnnnnnnnnnnnnnnnnnnnnnnnnnnnnnnnnnnnnnnnnnnnnnnnnnnnnnnnnnnnnnnnnnnnnnnnnnnnnnnnnnnnnnnnnnnnnnnnnnnnnnnnnnnnnnnnnnnnnnnnnnnnnnnnnnnnnnnnnnnnnnnnnnnnnnnnnnnnnnnnnnnnnnnnnnnnnnnnnnnnnnnnnnnnnnnnnnnnnnnnnnnnnnnnnnnnnnnnnnnnnnnnnnnnnnnnnnnnnnnnnnnnnnnnnnnnnnnnnnnnnnnnnnnnnnnnnnnnnnnnnnnnnnnnnnnnnnnnnnnnnnnnnnnnnnnnnnnnnnnnnnnnnnnnnnnnnnnnnnnnnnnnnnnnnnnnnnnnnnnnnnnnnnnnnnnnnnnnnnnnnnnnnnnnnnnnnnnnnnnnnnnnnnnnnnnnnnnnnnnnnnnnnnnnnnnnnnnnnnnnnnnnnnnnnnnnnnnnnnnnnnnnnnnnnnnnnnnnnnnnnnnnnnnnnnnnnnnnnnnnnnnnnnnnnnnnnnnnnnnnnnnnnnnnnnnnnnnnnnnnnnnnnnnnnnnnnnnnnnnnnnnnnnnnnnnnnnnnnnnnnnnnnnnnnnnnnnnnnnnnnnnnnnnnnnnnnnnnnnnnnnnnnnnnnnnnnnnnnnnnnnnnnnnnnnnnnnnnnnnnnnnnnnnnnnnnnnnnnnnnnnnnnnnnnnnnnnnnnnnnnnnnnnnnnnnnnnnnnnnnnnnnnnnnnnnnnnnnnnnnnnnnnnnnnnnnnnnnnnnnnnnnnnnnnnnnnnnnnnnnnnnnnnnnnnnnnnnnnnnnnnnnnnnnnnnnnnnnnnnnnnnnnnnnnnnnnnnnnnnnnnnnnnnnnnnnnnnnnnnnnnnnnnnnnnnnnnnnnnnnnnnnnnnnnnnnnnnnnnnnnnnnnnnnnnnnnnnnnnnnnnnnnnnnnnnnnnnnnnnnnnnnnnnnnnnnnnnnnnnnnnnnnnnnnnnnnnnnnnnnnnnnnnnnnnnnnnnnnnnnnnnnnnnnnnnnnnnnnnnnnnnnnnnnnnnnnnnnnnnnnnnnnnnnnnnnnnnnnnnnnnnnnnnnnnnnnnnnnnnnnnnnnnnnnnnnnnnnnnnnnnnnnnnnnnnnnnnnnnnnnnnnnnnnnnnnnnnnnnnnnnnnnnnnnnnnnnnnnnnnnnnnnnnnnnnnnnnnnnnnnnnnnnnnnnnnnnnnnnnnnnnnnnnnnnnnnnnnnnnnnnnnnnnnnnnnnnnnnnnnnnnnnnnnnnnnnnnnnnnnnnnnnnnnnnnnnnnnnnnnnnnnnnnnnnnnnnnnnnnnnnnnnnnnnnnnnnnnnnnnnnnnnnnnnnnnnnnnnnnnnnnnnnnnnnnnnnnnnnnnnnnnnnnnnnnnnnnnnnnnnnnnnnnnnnnnnnnnnnnnnnnnnnnnnnnnnnnnnnnnnnnnnnnnnnnnnnnnnnnnnnnnnnnnnnnnnnnnnnnnnnnnnnnnnnnnnnnnnnnnnnnnnnnnnnnnnnnnnnnnnnnnnnnnnnnnnnnnnnnnnnnnnnnnnnnnnnnnnnnnnnnnnnnnnnnnnnnnnnnnnnnnnnnnnnnnnnnnnnnnnnnnnnnnnnnnnnnnnnnnnnnnnnnnnnnnnnnnnnnnnnnnnnnnnnnnnnnnnnnnnnnnnnnnnnnnnnnnnnnnnnnnnnnnnnnnnnnnnnnnnnnnnnnnnnnnnnnnnnnnnnnnnnnnnnnnnnnnnnnnnnnnnnnnnnnnnnnnnnnnnnnnnnnnnnnnnnnnnnnnnnnnnnnnnnnnnnnnnnnnnnnnnnnnnnnnnnnnnnnnnnnnnnnnnnnnnnnnnnnnnnnnnnnnnnnnnnnnnnnnnnnnnnnnnnnnnnnnnnnnnnnnnnnnnnnnnnnnnnnnnnnnnnnnnnnnnnnnnnnnnnnnnnnnnnnnnnnnnnnnnnnnnnnnnnnnnnnnnnnnnnnnnnnnnnnnnnnnnnnnnnnnnnnnnnnnnnnnnnnnnnnnnnnnnnnnnnnnnnnnnnnnnnnnnnnnnnnnnnnnnnnnnnnnnnnnnnnnnnnnnnnnnnnnnnnnnnnnnnnnnnnnnnnnnnnnnnnnnnnnnnnnnnnnnnnnnnnnnnnnnnnnnnnnnnnnnnnnnnnnnnnnnnnnnnnnnnnnnnnnnnnnnnnnnnnnnnnnnnnnnnnnnnnnnnnnnnnnnnnnnnnnnnnnnnnnnnnnnnnnnnnnnnnnnnnnnnnnnnnnnnnnnnnnnnnnnnnnnnnnnnnnnnnnnnnnnnnnnnnnnnnnnnnnnnnnnnnnnnnnnnnnnnnnnnnnnnnnnnnnnnnnnnnnnnnnnnnnnnnnnnnnnnnnnnnnnnnnnnnnnnnnnnnnnnnnnnnnnnnnnnnnnnnnnnnnnnnnnnnnnnnnnnnnnnnnnnnnnnnnnnnnnnnnnnnnnnnnnnnnnnnnnnnnnnnnnnnnnnnnnnnnnnnnnnnnnnnnnnnnnnnnnnnnnnnnnnnnnnnnnnnnnnnnnnnnnnnnnnnnnnnnnnnnnnnnnnnnnnnnnnnnnnnnnnnnnnnnnnnnnnnnnnnnnnnnnnnnnnnnnnnnnnnnnnnnnnnnnnnnnnnnnnnnnnnnnnnnnnnnnnnnnnnnnnnnnnnnnnnnnnnnnnnnnnnnnnnnnnnnnnnnnnnnnnnnnnnnnnnnnnnnnnnnnnnnnnnnnnnnnnnnnnnnnnnnnnnnnnnnnnnnnnnnnnnnnnnnnnnnnnnnnnnnnnnnnnnnnnnnnnnnnnnnnnnnnnnnnnnnnnnnnnnnnnnnnnnnnnnnnnnnnnnnnnnnnnnnnnnnnnnnnnnnnnnnnnnnnnnnnnnnnnnnnnnnnnnnnnnnnnnnnnnnnnnnnnnnnnnnnnnnnnnnnnnnnnnnnnnnnnnnnnnnnnnnnnnnnnnnnnnnnnnnnnnnnnnnnnnnnnnnnnnnnnnnnnnnnnnnnnnnnnnnnnnnnnnnnnnnnnnnnnnnnnnnnnnnnnnnnnnnnnnnnnnnnnnnnnnnnnnnnnnnnnnnnnnnnnnnnnnnnnnnnnnnnnnnnnnnnnnnnnnnnnnnnnnnnnnnnnnnnnnnnnnnnnnnnnnnnnnnnnnnnnnnnnnnnnnnnnnnnnnnnnnnnnnnnnnnnnnnnnnnnnnnnnnnnnnnnnnnnnnnnnnnnnnnnnnnnnnnnnnnnnnnnnnnnnnnnnnnnnnnnnnnnnnnnnnnnnnnnnnnnnnnnnnnnnnnnnnnnnnnnnnnnnnnnnnnnnnnnnnnnnnnnnnnnnnnnnnnnnnnnnnnnnnnnnnnnnnnnnnnnnnnnnnnnnnnnnnnnnnnnnnnnnnnnnnnnnnnnnnnnnnnnnnnnnnnnnnnnnnnnnnnnnnnnnnnnnnnnnnnnnnnnnnnnnnnnnnnnnnnnnnnnnnnnnnnnnnnnnnnnnnnnnnnnnnnnnnnnnnnnnnnnnnnnnnnnnnnnnnnnnnnnnnnnnnnnnnnnnnnnnnnnnnnnnnnnnnnnnnnnnnnnnnnnnnnnnnnnnnnnnnnnnnnnnnnnnnnnnnnnnnnnnnnnnnnnnnnnnnnnnnnnnnnnnnnnnnnnnnnnnnnnnnnnnnnnnnnnnnnnnnnnnnnnnnnnnnnnnnnnnnnnnnnnnnnnnnnnnnnnnnnnnnnnnnnnnnnnnnnnnnnnnnnnnnnnnnnnnnnnnnnnnnnnnnnnnnnnnnnnnnnnnnnnnnnnnnnnnnnnnnnnnnnnnnnnnnnnnnnnnnnnnnnnnnnnnnnnnnnnnnnnnnnnnnnnnnnnnnnnnnnnnnnnnnnnnnnnnnnnnnnnnnnnnnnnnnnnnnnnnnnnnnnnnnnnnnnnnnnnnnnnnnnnnnnnnnnnnnnnnnnnnnnnnnnnnnnnnnnnnnnnnnnnnnnnnnnnnnnnnnnnnnnnnnnnnnnnnnnnnnnnnnnnnnnnnnnnnnnnnnnnnnnnnnnnnnnnnnnnnnnnnnnnnnnnnnnnnnnnnnnnnnnnnnnnnnnnnnnnnnnnnnnnnnnnnnnnnnnnnnnnnnnnnnnnnnnnnnnnnnnnnnnnnnnnnnnnnnnnnnnnnnnnnnnnnnnnnnnnnnnnnnnnnnnnnnnnnnnnnnnnnnnnnnnnnnnnnnnnnnnnnnnnnnnnnnnnnnnnnnnnnnnnnnnnnnnnnnnnnnnnnnnnnnnnnnnnnnnnnnnnnnnnnnnnnnnnnnnnnnnnnnnnnnnnnnnnnnnnnnnnnnnnnnnnnnnnnnnnnnnnnnnnnnnnnnnnnnnnnnnnnnnnnnnnnnnnnnnnnnnnnnnnnnnnnnnnnnnnnnnnnnnnnnnnnnnnnnnnnnnnnnnnnnnnnnnnnnnnnnnnnnnnnnnnnnnnnnnnnnnnnnnnnnnnnnnnnnnnnnnnnnnnnnnnnnnnnnnnnnnnnnnnnnnnnnnnnnnnnnnnnnnnnnnnnnnnnnnnnnnnnnnnnnnnnnnnnnnnnnnnnnnnnnnnnnnnnnnnnnnnnnnnnnnnnnnnnnnnnnnnnnnnnnnnnnnnnnnnnnnnnnnnnnnnnnnnnnnnnnnnnnnnnnnnnnnnnnnnnnnnnnnnnnnnnnnnnnnnnnnnnnnnnnnnnnnnnnnnnnnnnnnnnnnnnnnnnnnnnnnnnnnnnnnnnnnnnnnnnnnnnnnnnnnnnnnnnnnnnnnnnnnnnnnnnnnnnnnnnnnnnnnnnnnnnnnnnnnnnnnnnnnnnnnnnnnnnnnnnnnnnnnnnnnnnnnnnnnnnnnnnnnnnnnnnnnnnnnnnnnnnnnnnnnnnnnnnnnnnnnnnnnnnnnnnnnnnnnnnnnnnnnnnnnnnnnnnnnnnnnnnnnnnnnnnnnnnnnnnnnnnnnnnnnnnnnnnnnnnnnnnnnnnnnnnnnnnnnnnnnnnnnnnnnnnnnnnnnnnnnnnnnnnnnnnnnnnnnnnnnnnnnnnnnnnnnnnnnnnnnnnnnnnnnnnnnnnnnnnnnnnnnnnnnnnnnnnnnnnnnnnnnnnnnnnnnnnnnnnnnnnnnnnnnnnnnnnnnnnnnnnnnnnnnnnnnnnnnnnnnnnnnnnnnnnnnnnnnnnnnnnnnnnnnnnnnnnnnnnnnnnnnnnnnnnnnnnnnnnnnnnnnnnnnnnnnnnnnnnnnnnnnnnnnnnnnnnnnnnnnnnnnnnnnnnnnnnnnnnnnnnnnnnnnnnnnnnnnnnnnnnnnnnnnnnnnnnnnnnnnnnnnnnnnnnnnnnnnnnnnnnnnnnnnnnnnnnnnnnnnnnnnnnnnnnnnnnnnnnnnnnnnnnnnnnnnnnnnnnnnnnnnnnnnnnnnnnnnnnnnnnnnnnnnnnnnnnnnnnnnnnnnnnnnnnnnnnnnnnnnnnnnnnnnnnnnnnnnnnnnnnnnnnnnnnnnnnnnnnnnnnnnnnnnnnnnnnnnnnnnnnnnnnnnnnnnnnnnnnnnnnnnnnnnnnnnnnnnnnnnnnnnnnnnnnnnnnnnnnnnnnnnnnnnnnnnnnnnnnnnnnnnnnnnnnnnnnnnnnnnnnnnnnnnnnnnnnnnnnnnnnnnnnnnnnnnnnnnnnnnnnnnnnnnnnnnnnnnnnnnnnnnnnnnnnnnnnnnnnnnnnnnnnnnnnnnnnnnnnnnnnnnnnnnnnnnnnnnnnnnnnnnnnnnnnnnnnnnnnnnnnnnnnnnnnnnnnnnnnnnnnnnnnnnnnnnnnnnnnnnnnnnnnnnnnnnnnnnnnnnnnnnnnnnnnnnnnnnnnnnnnnnnnnnnnnnnnnnnnnnnnnnnnnnnnnnnnnnnnnnnnnnnnnnnnnnnnnnnnnnnnnnnnnnnnnnnnnnnnnnnnnnnnnnnnnnnnnnnnnnnnnnnnnnnnnnnnnnnnnnnnnnnnnnnnnnnnnnnnnnnnnnnnnnnnnnnnnnnnnnnnnnnnnnnnnnnnnnnnnnnnnnnnnnnnnnnnnnnnnnnnnnnnnnnnnnnnnnnnnnnnnnnnnnnnnnnnnnnnnnnnnnnnnnnnnnnnnnnnnnnnnnnnnnnnnnnnnnnnnnnnnnnnnnnnnnnnnnnnnnnnnnnnnnnnnnnnnnnnnnnnnnnnnnnnnnnnnnnnnnnnnnnnnnnnnnnnnnnnnnnnnnnnnnnnnnnnnnnnnnnnnnnnnnnnnnnnnnnnnnnnnnnnnnnnnnnnnnnnnnnnnnnnnnnnnnnnnnnnnnnnnnnnnnnnnnnnnnnnnnnnnnnnnnnnnnnnnnnnnnnnnnnnnnnnnnnnnnnnnnnnnnnnnnnnnnnnnnnnnnnnnnnnnnnnnnnnnnnnnnnnnnnnnnnnnnnnnnnnnnnnnnnnnnnnnnnnnnnnnnnnnnnnnnnnnnnnnnnnnnnnnnnnnnnnnnnnnnnnnnnnnnnnnnnnnnnnnnnnnnnnnnnnnnnnnnnnnnnnnnnnnnnnnnnnnnnnnnnnnnnnnnnnnnnnnnnnnnnnnnnnnnnnnnnnnnnnnnnnnnnnnnnnnnnnnnnnnnnnnnnnnnnnnnnnnnnnnnnnnnnnnnnnnnnnnnnnnnnnnnnnnnnnnnnnnnnnnnnnnnnnnnnnnnnnnnnnnnnnnnnnnnnnnnnnnnnnnnnnnnnnnnnnnnnnnnnnnnnnnnnnnnnnnnnnnnnnnnnnnnnnnnnnnnnnnnnnnnnnnnnnnnnnnnnnnnnnnnnnnnnnnnnnnnnnnnnnnnnnnnnnnnnnnnnnnnnnnnnnnnnnnnnnnnnnnnnnnnnnnnnnnnnnnnnnnnnnnnnnnnnnnnnnnnnnnnnnnnnnnnnnnnnnnnnnnnnnnnnnnnnnnnnnnnnnnnnnnnnnnnnnnnnnnnnnnnnnnnnnnnnnnnnnnnnnnnnnnnnnnnnnnnnnnnnnnnnnnnnnnnnnnnnnnnnnnnnnnnnnnnnnnnnnnnnnnnnnnnnnnnnnnnnnnnnnnnnnnnnnnnnnnnnnnnnnnnnnnnnnnnnnnnnnnnnnnnnnnnnnnnnnnnnnnnnnnnnnnnnnnnnnnnnnnnnnnnnnnnnnnnnnnnnnnnnnnnnnnnnnnnnnnnnnnnnnnnnnnnnnnnnnnnnnnnnnnnnnnnnnnnnnnnnnnnnnnnnnnnnnnnnnnnnnnnnnnnnnnnnnnnnnnnnnnnnnnnnnnnnnnnnnnnnnnnnnnnnnnnnnnnnnnnnnnnnnnnnnnnnnnnnnnnnnnnnnnnnnnnnnnnnnnnnnnnnnnnnnnnnnnnnnnnnnnnnnnnnnnnnnnnnnnnnnnnnnnnnnnnnnnnnnnnnnnnnnnnnnnnnnnnnnnnnnnnnnnnnnnnnnnnnnnnnnnnnnnnnnnnnnnnnnnnnnnnnnnnnnnnnnnnnnnnnnnnnnnnnnnnnnnnnnnnnnnnnnnnnnnnnnnnnnnnnnnnnnnnnnnnnnnnnnnnnnnnnnnnnnnnnnnnnnnnnnnnnnnnnnnnnnnnnnnnnnnnnnnnnnnnnnnnnnnnnnnnnnnnnnnnnnnnnnnnnnnnnnnnnnnnnnnnnnnnnnnnnnnnnnnnnnnnnnnnnnnnnnnnnnnnnnnnnnnnnnnnnnnnnnnnnnnnnnnnnnnnnnnnnnnnnnnnnnnnnnnnnnnnnnnnnnnnnnnnnnnnnnnnnnnnnnnnnnnnnnnnnnnnnnnnnnnnnnnnnnnnnnnnnnnnnnnnnnnnnnnnnnnnnnnnnnnnnnnnnnnnnnnnnnnnnnnnnnnnnnnnnnnnnnnnnnnnnnnnnnnnnnnnnnnnnnnnnnnnnnnnnnnnnnnnnnnnnnnnnnnnnnnnnnnnnnnnnnnnnnnnnnnnnnnnnnnnnnnnnnnnnnnnnnnnnnnnnnnnnnnnnnnnnnnnnnnnnnnnnnnnnnnnnnnnnnnnnnnnnnnnnnnnnnnnnnnnnnnnnnnnnnnnnnnnnnnnnnnnnnnnnnnnnnnnnnnnnnnnnnnnnnnnnnnnnnnnnnnnnnnnnnnnnnnnnnnnnnnnnnnnnnnnnnnnnnnnnnnnnnnnnnnnnnnnnnnnnnnnnnnnnnnnnnnnnnnnnnnnnnnnnnnnnnnnnnnnnnnnnnnnnnnnnnnnnnnnnnnnnnnnnnnnnnnnnnnnnnnnnnnnnnnnnnnnnnnnnnnnnnnnnnnnnnnnnnnnnnnnnnnnnnnnnnnnnnnnnnnnnnnnnnnnnnnnnnnnnnnnnnnnnnnnnnnnnnnnnnnnnnnnnnnnnnnnnnnnnnnnnnnnnnnnnnnnnnnnnnnnnnnnnnnnnnnnnnnnnnnnnnnnnnnnnnnnnnnnnnnnnnnnnnnnnnnnnnnnnnnnnnnnnnnnnnnnnnnnnnnnnnnnnnnnnnnnnnnnnnnnnnnnnnnnnnnnnnnnnnnnnnnnnnnnnnnnnnnnnnnnnnnnnnnnnnnnnnnnnnnnnnnnnnnnnnnnnnnnnnnnnnnnnnnnnnnnnnnnnnnnnnnnnnnnnnnnnnnnnnnnnnnnnnnnnnnnnnnnnnnnnnnnnnnnnnnnnnnnnnnnnnnnnnnnnnnnnnnnnnnnnnnnnnnnnnnnnnnnnnnnnnnnnnnnnnnnnnnnnnnnnnnnnnnnnnnnnnnnnnnnnnnnnnnnnnnnnnnnnnnnnnnnnnnnnnnnnnnnnnnnnnnnnnnnnnnnnnnnnnnnnnnnnnnnnnnnnnnnnnnnnnnnnnnnnnnnnnnnnnnnnnnnnnnnnnnnnnnnnnnnnnnnnnnnnnnnnnnnnnnnnnnnnnnnnnnnnnnnnnnnnnnnnnnnnnnnnnnnnnnnnnnnnnnnnnnnnnnnnnnnnnnnnnnnnnnnnnnnnnnnnnnnnnnnnnnnnnnnnnnnnnnnnnnnnnnnnnnnnnnnnnnnnnnnnnnnnnnnnnnnnnnnnnnnnnnnnnnnnnnnnnnnnnnnnnnnnnnnnnnnnnnnnnnnnnnnnnnnnnnnnnnnnnnnnnnnnnnnnnnnnnnnnnnnnnnnnnnnnnnnnnnnnnnnnnnnnnnnnnnnnnnnnnnnnnnnnnnnnnnnnnnnnnnnnnnnnnnnnnnnnnnnnnnnnnnnnnnnnnnnnnnnnnnnnnnnnnnnnnnnnnnnnnnnnnnnnnnnnnnnnnnnnnnnnnnnnnnnnnnnnnnnnnnnnnnnnnnnnnnnnnnnnnnnnnnnnnnnnnnnnnnnnnnnnnnnnnnnnnnnnnnnnnnnnnnnnnnnnnnnnnnnnnnnnnnnnnnnnnnnnnnnnnnnnnnnnnnnnnnnnnnnnnnnnnnnnnnnnnnnnnnnnnnnnnnnnnnnnnnnnnnnnnnnnnnnnnnnnnnnnnnnnnnnnnnnnnnnnnnnnnnnnnnnnnnnnnnnnnnnnnnnnnnnnnnnnnnnnnnnnnnnnnnnnnnnnnnnnnnnnnnnnnnnnnnnnnnnnnnnnnnnnnnnnnnnnnnnnnnnnnnnnnnnnnnnnnnnnnnnnnnnnnnnnnnnnnnnnnnnnnnnnnnnnnnnnnnnnnnnnnnnnnnnnnnnnnnnnnnnnnnnnnnnnnnnnnnnnnnnnnnnnnnnnnnnnnnnnnnnnnnnnnnnnnnnnnnnnnnnnnnnnnnnnnnnnnnnnnnnnnnnnnnnnnnnnnnnnnnnnnnnnnnnnnnnnnnnnnnnnnnnnnnnnnnnnnnnnnnnnnnnnnnnnnnnnnnnnnnnnnnnnnnnnnnnnnnnnnnnnnnnnnnnnnnnnnnnnnnnnnnnnnnnnnnnnnnnnnnnnnnnnnnnnnnnnnnnnnnnnnnnnnnnnnnnnnnnnnnnnnnnnnnnnnnnnnnnnnnnnnnnnnnnnnnnnnnnnnnnnnnnnnnnnnnnnnnnnnnnnnnnnnnnnnnnnnnnnnnnnnnnnnnnnnnnnnnnnnnnnnnnnnnnnnnnnnnnnnnnnnnnnnnnnnnnnnnnnnnnnnnnnnnnnnnnnnnnnnnnnnnnnnnnnnnnnnnnnnnnnnnnnnnnnnnnnnnnnnnnnnnnnnnnnnnnnnnnnnnnnnnnnnnnnnnnnnnnnnnnnnnnnnnnnnnnnnnnnnnnnnnnnnnnnnnnnnnnnnnnnnnnnnnnnnnnnnnnnnnnnnnnnnnnnnnnnnnnnnnnnnnnnnnnnnnnnnnnnnnnnnnnnnnnnnnnnnnnnnnnnnnnnnnnnnnnnnnnnnnnnnnnnnnnnnnnnnnnnnnnnnnnnnnnnnnnnnnnnnnnnnnnnnnnnnnnnnnnnnnnnnnnnnnnnnnnnnnnnnnnnnnnnnnnnnnnnnnnnnnnnnnnnnnnnnnnnnnnnnnnnnnnnnnnnnnnnnnnnnnnnnnnnnnnnnnnnnnnnnnnnnnnnnnnnnnnnnnnnnnnnnnnnnnnnnnnnnnnnnnnnnnnnnnnnnnnnnnnnnnnnnnnnnnnnnnnnnnnnnnnnnnnnnnnnnnnnnnnnnnnnnnnnnnnnnnnnnnnnnnnnnnnnnnnnnnnnnnnnnnnnnnnnnnnnnnnnnnnnnnnnnnnnnnnnnnnnnnnnnnnnnnnnnnnnnnnnnnnnnnnnnnnnnnnnnnnnnnnnnnnnnnnnnnnnnnnnnnnnnnnnnnnnnnnnnnnnnnnnnnnnnnnnnnnnnnnnnnnnnnnnnnnnnnnnnnnnnnnnnnnnnnnnnnnnnnnnnnnnnnnnnnnnnnnnnnnnnnnnnnnnnnnnnnnnnnnnnnnnnnnnnnnnnnnnnnnnnnnnnnnnnnnnnnnnnnnnnnnnnnnnnnnnnnnnnnnnnnnnnnnnnnnnnnnnnnnnnnnnnnnnnnnnnnnnnnnnnnnnnnnnnnnnnnnnnnnnnnnnnnnnnnnnnnnnnnnnnnnnnnnnnnnnnnnnnnnnnnnnnnnnnnnnnnnnnnnnnnnnnnnnnnnnnnnnnnnnnnnnnnnnnnnnnnnnnnnnnnnnnnnnnnnnnnnnnnnnnnnnnnnnnnnnnnnnnnnnnnnnnnnnnnnnnnnnnnnnnnnnnnnnnnnnnnnnnnnnnnnnnnnnnnnnnnnnnnnnnnnnnnnnnnnnnnnnnnnnnnnnnnnnnnnnnnnnnnnnnnnnnnnnnnnnnnnnnnnnnnnnnnnnnnnnnnnnnnnnnnnnnnnnnnnnnnnnnnnnnnnnnnnnnnnnnnnnnnnnnnnnnnnnnnnnnnnnnnnnnnnnnnnnnnnnnnnnnnnnnnnnnnnnnnnnnnnnnnnnnnnnnnnnnnnnnnnnnnnnnnnnnnnnnnnnnnnnnnnnnnnnnnnnnnnnnnnnnnnnnnnnnnnnnnnnnnnnnnnnnnnnnnnnnnnnnnnnnnnnnnnnnnnnnnnnnnnnnnnnnnnnnnnnnnnnnnnnnnnnnnnnnnnnnnnnnnnnnnnnnnnnnnnnnnnnnnnnnnnnnnnnnnnnnnnnnnnnnnnnnnnnnnnnnnnnnnnnnnnnnnnnnnnnnnnnnnnnnnnnnnnnnnnnnnnnnnnnnnnnnnnnnnnnnnnnnnnnnnnnnnnnnnnnnnnnnnnnnnnnnnnnnnnnnnnnnnnnnnnnnnnnnnnnnnnnnnnnnnnnnnnnnnnnnnnnnnnnnnnnnnnnnnnnnnnnnnnnnnnnnnnnnnnnnnnnnnnnnnnnnnnnnnnnnnnnnnnnnnnnnnnnnnnnnnnnnnnnnnnnnnnnnnnnnnnnnnnnnnnnnnnnnnnnnnnnnnnnnnnnnnnnnnnnnnnnnnnnnnnnnnnnnnnnnnnnnnnnnnnnnnnnnnnnnnnnnnnnnnnnnnnnnnnnnnnnnnnnnnnnnnnnnnnnnnnnnnnnnnnnnnnnnnnnnnnnnnnnnnnnnnnnnnnnnnnnnnnnnnnnnnnnnnnnnnnnnnnnnnnnnnnnnnnnnnnnnnnnnnnnnnnnnnnnnnnnnnnnnnnnnnnnnnnnnnnnnnnnnnnnnnnnnnnnnnnnnnnnnnnnnnnnnnnnnnnnnnnnnnnnnnnnnnnnnnnnnnnnnnnnnnnnnnnnnnnnnnnnnnnnnnnnnnnnnnnnnnnnnnnnnnnnnnnnnnnnnnnnnnnnnnnnnnnnnnnnnnnnnnnnnnnnnnnnnnnnnnnnnnnnnnnnnnnnnnnnnnnnnnnnnnnnnnnnnnnnnnnnnnnnnnnnnnnnnnnnnnnnnnnnnnnnnnnnnnnnnnnnnnnnnnnnnnnnnnnnnnnnnnnnnnnnnnnnnnnnnnnnnnnnnnnnnnnnnnnnnnnnnnnnnnnnnnnnnnnnnnnnnnnnnnnnnnnnnnnnnnnnnnnnnnnnnnnnnnnnnnnnnnnnnnnnnnnnnnnnnnnnnnnnnnnnnnnnnnnnnnnnnnnnnnnnnnnnnnnnnnnnnnnnnnnnnnnnnnnnnnnnnnnnnnnnnnnnnnnnnnnnnnnnnnnnnnnnnnnnnnnnnnnnnnnnnnnnnnnnnnnnnnnnnnnnnnnnnnnnnnnnnnnnnnnnnnnnnnnnnnnnnnnnnnnnnnnnnnnnnnnnnnnnnnnnnnnnnnnnnnnnnnnnnnnnnnnnnnnnnnnnnnnnnnnnnnnnnnnnnnnnnnnnnnnnnnnnnnnnnnnnnnnnnnnnnnnnnnnnnnnnnnnnnnnnnnnnnnnnnnnnnnnnnnnnnnnnnnnnnnnnnnnnnnnnnnnnnnnnnnnnnnnnnnnnnnnnnnnnnnnnnnnnnnnnnnnnnnnnnnnnnnnnnnnnnnnnnnnnnnnnnnnnnnnnnnnnnnnnnnnnnnnnnnnnnnnnnnnnnnnnnnnnnnnnnnnnnnnnnnnnnnnnnnnnnnnnnnnnnnnnnnnnnnnnnnnnnnnnnnnnnnnnnnnnnnnnnnnnnnnnnnnnnnnnnnnnnnnnnnnnnnnnnnnnnnnnnnnnnnnnnnnnnnnnnnnnnnnnnnnnnnnnnnnnnnnnnnnnnnnnnnnnnnnnnnnnnnnnnnnnnnnnnnnnnnnnnnnnnnnnnnnnnnnnnnnnnnnnnnnnnnnnnnnnnnnnnnnnnnnnnnnnnnnnnnnnnnnnnnnnnnnnnnnnnnnnnnnnnnnnnnnnnnnnnnnnnnnnnnnnnnnnnnnnnnnnnnnnnnnnnnnnnnnnnnnnnnnnnnnnnnnnnnnnnnnnnnnnnnnnnnnnnnnnnnnnnnnnnnnnnnnnnnnnnnnnnnnnnnnnnnnnnnnnnnnnnnnnnnnnnnnnnnnnnnnnnnnnnnnnnnnnnnnnnnnnnnnnnnnnnnnnnnnnnnnnnnnnnnnnnnnnnnnnnnnnnnnnnnnnnnnnnnnnnnnnnnnnnnnnnnnnnnnnnnnnnnnnnnnnnnnnnnnnnnnnnnnnnnnnnnnnnnnnnnnnnnnnnnnnnnnnnnnnnnnnnnnnnnnnnnnnnnnnnnnnnnnnnnnnnnnnnnnnnnnnnnnnnnnnnnnnnnnnnnnnnnnnnnnnnnnnnnnnnnnnnnnnnnnnnnnnnnnnnnnnnnnnnnnnnnnnnnnnnnnnnnnnnnnnnnnnnnnnnnnnnnnnnnnnnnnnnnnnnnnnnnnnnnnnnnnnnnnnnnnnnnnnnnnnnnnnnnnnnnnnnnnnnnnnnnnnnnnnnnnnnnnnnnnnnnnnnnnnnnnnnnnnnnnnnnnnnnnnnnnnnnnnnnnnnnnnnnnnnnnnnnnnnnnnnnnnnnnnnnnnnnnnnnnnnnnnnnnnnnnnnnnnnnnnnnnnnnnnnnnnnnnnnnnnnnnnnnnnnnnnnnnnnnnnnnnnnnnnnnnnnnnnnnnnnnnnnnnnnnnnnnnnnnnnnnnnnnnnnnnnnnnnnnnnnnnnnnnnnnnnnnnnnnnnnnnnnnnnnnnnnnnnnnnnnnnnnnnnnnnnnnnnnnnnnnnnnnnnnnnnnnnnnnnnnnnnnnnnnnnnnnnnnnnnnnnnnnnnnnnnnnnnnnnnnnnnnnnnnnnnnnnnnnnnnnnnnnnnnnnnnnnnnnnnnnnnnnnnnnnnnnnnnnnnnnnnnnnnnnnnnnnnnnnnnnnnnnnnnnnnnnnnnnnnnnnnnnnnnnnnnnnnnnnnnnnnnnnnnnnnnnnnnnnnnnnnnnnnnnnnnnnnnnnnnnnnnnnnnnnnnnnnnnnnnnnnnnnnnnnnnnnnnnnnnnnnnnnnnnnnnnnnnnnnnnnnnnnnnnnnnnnnnnnnnnnnnnnnnnnnnnnnnnnnnnnnnnnnnnnnnnnnnnnnnnnnnnnnnnnnnnnnnnnnnnnnnnnnnnnnnnnnnnnnnnnnnnnnnnnnnnnnnnnnnnnnnnnnnnnnnnnnnnnnnnnnnnnnnnnnnnnnnnnnnnnnnnnnnnnnnnnnnnnnnnnnnnnnnnnnnnnnnnnnnnnnnnnnnnnnnnnnnnnnnnnnnnnnnnnnnnnnnnnnnnnnnnnnnnnnnnnnnnnnnnnnnnnnnnnnnnnnnnnnnnnnnnnnnnnnnnnnnnnnnnnnnnnnnnnnnnnnnnnnnnnnnnnnnnnnnnnnnnnnnnnnnnnnnnnnnnnnnnnnnnnnnnnnnnnnnnnnnnnnnnnnnnnnnnnnnnnnnnnnnnnnnnnnnnnnnnnnnnnnnnnnnnnnnnnnnnnnnnnnnnnnnnnnnnnnnnnnnnnnnnnnnnnnnnnnnnnnnnnnnnnnnnnnnnnnnnnnnnnnnnnnnnnnnnnnnnnnnnnnnnnnnnnnnnnnnnnnnnnnnnnnnnnnnnnnnnnnnnnnnnnnnnnnnnnnnnnnnnnnnnnnnnnnnnnnnnnnnnnnnnnnnnnnnnnnnnnnnnnnnnnnnnnnnnnnnnnnnnnnnnnnnnnnnnnnnnnnnnnnnnnnnnnnnnnnnnnnnnnnnnnnnnnnnnnnnnnnnnnnnnnnnnnnnnnnnnnnnnnnnnnnnnnnnnnnnnnnnnnnnnnnnnnnnnnnnnnnnnnnnnnnnnnnnnnnnnnnnnnnnnnnnnnnnnnnnnnnnnnnnnnnnnnnnnnnnnnnnnnnnnnnnnnnnnnnnnnnnnnnnnnnnnnnnnnnnnnnnnnnnnnnnnnnnnnnnnnnnnnnnnnnnnnnnnnnnnnnnnnnnnnnnnnnnnnnnnnnnnnnnnnnnnnnnnnnnnnnnnnnnnnnnnnnnnnnnnnnnnnnnnnnnnnnnnnnnnnnnnnnnnnnnnnnnnnnnnnnnnnnnnnnnnnnnnnnnnnnnnnnnnnnnnnnnnnnnnnnnnnnnnnnnnnnnnnnnnnnnnnnnnnnnnnnnnnnnnnnnnnnnnnnnnnnnnnnnnnnnnnnnnnnnnnnnnnnnnnnnnnnnnnnnnnnnnnnnnnnnnnnnnnnnnnnnnnnnnnnnnnnnnnnnnnnnnnnnnnnnnnnnnnnnnnnnnnnnnnnnnnnnnnnnnnnnnnnnnnnnnnnnnnnnnnnnnnnnnnnnnnnnnnnnnnnnnnnnnnnnnnnnnnnnnnnnnnnnnnnnnnnnnnnnnnnnnnnnnnnnnnnnnnnnnnnnnnnnnnnnnnnnnnnnnnnnnnnnnnnnnnnnnnnnnnnnnnnnnnnnnnnnnnnnnnnnnnnnnnnnnnnnnnnnnnnnnnnnnnnnnnnnnnnnnnnnnnnnnnnnnnnnnnnnnnnnnnnnnnnnnnnnnnnnnnnnnnnnnnnnnnnnnnnnnnnnnnnnnnnnnnnnnnnnnnnnnnnnnnnnnnnnnnnnnnnnnnnnnnnnnnnnnnnnnnnnnnnnnnnnnnnnnnnnnnnnnnnnnnnnnnnnnnnnnnnnnnnnnnnnnnnnnnnnnnnnnnnnnnnnnnnnnnnnnnnnnnnnnnnnnnnnnnnnnnnnnnnnnnnnnnnnnnnnnnnnnnnnnnnnnnnnnnnnnnnnnnnnnnnnnnnnnnnnnnnnnnnnnnnnnnnnnnnnnnnnnnnnnnnnnnnnnnnnnnnnnnnnnnnnnnnnnnnnnnnnnnnnnnnnnnnnnnnnnnnnnnnnnnnnnnnnnnnnnnnnnnnnnnnnnnnnnnnnnnnnnnnnnnnnnnnnnnnnnnnnnnnnnnnnnnnnnnnnnnnnnnnnnnnnnnnnnnnnnnnnnnnnnnnnnnnnnnnnnnnnnnnnnnnnnnnnnnnnnnnnnnnnnnnnnnnnnnnnnnnnnnnnnnnnnnnnnnnnnnnnnnnnnnnnnnnnnnnnnnnnnnnnnnnnnnnnnnnnnnnnnnnnnnnnnnnnnnnnnnnnnnnnnnnnnnnnnnnnnnnnnnnnnnnnnnnnnnnnnnnnnnnnnnnnnnnnnnnnnnnnnnnnnnnnnnnnnnnnnnnnnnnnnnnnnnnnnnnnnnnnnnnnnnnnnnnnnnnnnnnnnnnnnnnnnnnnnnnnnnnnnnnnnnnnnnnnnnnnnnnnnnnnnnnnnnnnnnnnnnnnnnnnnnnnnnnnnnnnnnnnnnnnnnnnnnnnnnnnnnnnnnnnnnnnnnnnnnnnnnnnnnnnnnnnnnnnnnnnnnnnnnnnnnnnnnnnnnnnnnnnnnnnnnnnnnnnnnnnnnnnnnnnnnnnnnnnnnnnnnnnnnnnnnnnnnnnnnnnnnnnnnnnnnnnnnnnnnnnnnnnnnnnnnnnnnnnnnnnnnnnnnnnnnnnnnnnnnnnnnnnnnnnnnnnnnnnnnnnnnnnnnnnnnnnnnnnnnnnnnnnnnnnnnnnnnnnnnnnnnnnnnnnnnnnnnnnnnnnnnnnnnnnnnnnnnnnnnnnnnnnnnnnnnnnnnnnnnnnnnnnnnnnnnnnnnnnnnnnnnnnnnnnnnnnnnnnnnnnnnnnnnnnnnnnnnnnnnnnnnnnnnnnnnnnnnnnnnnnnnnnnnnnnnnnnnnnnnnnnnnnnnnnnnnnnnnnnnnnnnnnnnnnnnnnnnnnnnnnnnnnnnnnnnnnnnnnnnnnnnnnnnnnnnnnnnnnnnnnnnnnnnnnnnnnnnnnnnnnnnnnnnnnnnnnnnnnnnnnnnnnnnnnnnnnnnnnnnnnnnnnnnnnnnnnnnnnnnnnnnnnnnnnnnnnnnnnnnnnnnnnnnnnnnnnnnnnnnnnnnnnnnnnnnnnnnnnnnnnnnnnnnnnnnnnnnnnnnnnnnnnnnnnnnnnnnnnnnnnnnnnnnnnnnnnnnnnnnnnnnnnnnnnnnnnnnnnnnnnnnnnnnnnnnnnnnnnnnnnnnnnnnnnnnnnnnnnnnnnnnnnnnnnnnnnnnnnnnnnnnnnnnnnnnnnnnnnnnnnnnnnnnnnnnnnnnnnnnnnnnnnnnnnnnnnnnnnnnnnnnnnnnnnnnnnnnnnnnnnnnnnnnnnnnnnnnnnnnnnnnnnnnnnnnnnnnnnnnnnnnnnnnnnnnnnnnnnnnnnnnnnnnnnnnnnnnnnnnnnnnnnnnnnnnnnnnnnnnnnnnnnnnnnnnnnnnnnnnnnnnnnnnnnnnnnnnnnnnnnnnnnnnnnnnnnnnnnnnnnnnnnnnnnnnnnnnnnnnnnnnnnnnnnnnnnnnnnnnnnnnnnnnnnnnnnnnnnnnnnnnnnnnnnnnnnnnnnnnnnnnnnnnnnnnnnnnnnnnnnnnnnnnnnnnnnnnnnnnnnnnnnnnnnnnnnnnnnnnnnnnnnnnnnnnnnnnnnnnnnnnnnnnnnnnnnnnnnnnnnnnnnnnnnnnnnnnnnnnnnnnnnnnnnnnnnnnnnnnnnnnnnnnnnnnnnnnnnnnnnnnnnnnnnnnnnnnnnnnnnnnnnnnnnnnnnnnnnnnnnnnnnnnnnnnnnnnnnnnnnnnnnnnnnnnnnnnnnnnnnnnnnnnnnnnnnnnnnnnnnnnnnnnnnnnnnnnnnnnnnnnnnnnnnnnnnnnnnnnnnnnnnnnnnnnnnnnnnnnnnnnnnnnnnnnnnnnnnnnnnnnnnnnnnnnnnnnnnnnnnnnnnnnnnnnnnnnnnnnnnnnnnnnnnnnnnnnnnnnnnnnnnnnnnnnnnnnnnnnnnnnnnnnnnnnnnnnnnnnnnnnnnnnnnnnnnnnnnnnnnnnnnnnnnnnnnnnnnnnnnnnnnnnnnnnnnnnnnnnnnnnnnnnnnnnnnnnnnnnnnnnnnnnnnnnnnnnnnnnnnnnnnnnnnnnnnnnnnnnnnnnnnnnnnnnnnnnnnnnnnnnnnnnnnnnnnnnnnnnnnnnnnnnnnnnnnnnnnnnnnnnnnnnnnnnnnnnnnnnnnnnnnnnnnnnnnnnnnnnnnnnnnnnnnnnnnnnnnnnnnnnnnnnnnnnnnnnnnnnnnnnnnnnnnnnnnnnnnnnnnnnnnnnnnnnnnnnnnnnnnnnnnnnnnnnnnnnnnnnnnnnnnnnnnnnnnnnnnnnnnnnnnnnnnnnnnnnnnnnnnnnnnnnnnnnnnnnnnnnnnnnnnnnnnnnnnnnnnnnnnnnnnnnnnnnnnnnnnnnnnnnnnnnnnnnnnnnnnnnnnnnnnnnnnnnnnnnnnnnnnnnnnnnnnnnnnnnnnnnnnnnnnnnnnnnnnnnnnnnnnnnnnnnnnnnnnnnnnnnnnnnnnnnnnnnnnnnnnnnnnnnnnnnnnnnnnnnnnnnnnnnnnnnnnnnnnnnnnnnnnnnnnnnnnnnnnnnnnnnnnnnnnnnnnnnnnnnnnnnnnnnnnnnnnnnnnnnnnnnnnnnnnnnnnnnnnnnnnnnnnnnnnnnnnnnnnnnnnnnnnnnnnnnnnnnnnnnnnnnnnnnnnnnnnnnnnnnnnnnnnnnnnnnnnnnnnnnnnnnnnnnnnnnnnnnnnnnnnnnnnnnnnnnnnnnnnnnnnnnnnnnnnnnnnnnnnnnnnnnnnnnnnnnnnnnnnnnnnnnnnnnnnnnnnnnnnnnnnnnnnnnnnnnnnnnnnnnnnnnnnnnnnnnnnnnnnnnnnnnnnnnnnnnnnnnnnnnnnnnnnnnnnnnnnnnnnnnnnnnnnnnnnnnnnnnnnnnnnnnnnnnnnnnnnnnnnnnnnnnnnnnnnnnnnnnnnnnnnnnnnnnnnnnnnnnnnnnnnnnnnnnnnnnnnnnnnnnnnnnnnnnnnnnnnnnnnnnnnnnnnnnnnnnnnnnnnnnnnnnnnnnnnnnnnnnnnnnnnnnnnnnnnnnnnnnnnnnnnnnnnnnnnnnnnnnnnnnnnnnnnnnnnnnnnnnnnnnnnnnnnnnnnnnnnnnnnnnnnnnnnnnnnnnnnnnnnnnnnnnnnnnnnnnnnnnnnnnnnnnnnnnnnnnnnnnnnnnnnnnnnnnnnnnnnnnnnnnnnnnnnnnnnnnnnnnnnnnnnnnnnnnnnnnnnnnnnnnnnnnnnnnnnnnnnnnnnnnnnnnnnnnnnnnnnnnnnnnnnnnnnnnnnnnnnnnnnnnnnnnnnnnnnnnnnnnnnnnnnnnnnnnnnnnnnnnnnnnnnnnnnnnnnnnnnnnnnnnnnnnnnnnnnnnnnnnnnnnnnnnnnnnnnnnnnnnnnnnnnnnnnnnnnnnnnnnnnnnnnnnnnnnnnnnnnnnnnnnnnnnnnnnnnnnnnnnnnnnnnnnnnnnnnnnnnnnnnnnnnnnnnnnnnnnnnnnnnnnnnnnnnnnnnnnnnnnnnnnnnnnnnnnnnnnnnnnnnnnnnnnnnnnnnnnnnnnnnnnnnnnnnnnnnnnnnnnnnnnnnnnnnnnnnnnnnnnnnnnnnnnnnnnnnnnnnnnnnnnnnnnnnnnnnnnnnnnnnnnnnnnnnnnnnnnnnnnnnnnnnnnnnnnnnnnnnnnnnnnnnnnnnnnnnnnnnnnnnnnnnnnnnnnnnnnnnnnnnnnnnnnnnnnnnnnnnnnnnnnnnnnnnnnnnnnnnnnnnnnnnnnnnnnnnnnnnnnnnnnnnnnnnnnnnnnnnnnnnnnnnnnnnnnnnnnnnnnnnnnnnnnnnnnnnnnnnnnnnnnnnnnnnnnnnnnnnnnnnnnnnnnnnnnnnnnnnnnnnnnnnnnnnnnnnnnnnnnnnnnnnnnnnnnnnnnnnnnnnnnnnnnnnnnnnnnnnnnnnnnnnnnnnnnnnnnnnnnnnnnnnnnnnnnnnnnnnnnnnnnnnnnnnnnnnnnnnnnnnnnnnnnnnnnnnnnnnnnnnnnnnnnnnnnnnnnnnnnnnnnnnnnnnnnnnnnnnnnnnnnnnnnnnnnnnnnnnnnnnnnnnnnnnnnnnnnnnnnnnnnnnnnnnnnnnnnnnnnnnnnnnnnnnnnnnnnnnnnnnnnnnnnnnnnnnnnnnnnnnnnnnnnnnnnnnnnnnnnnnnnnnnnnnnnnnnnnnnnnnnnnnnnnnnnnnnnnnnnnnnnnnnnnnnnnnnnnnnnnnnnnnnnnnnnnnnnnnnnnnnnnnnnnnnnnnnnnnnnnnnnnnnnnnnnnnnnnnnnnnnnnnnnnnnnnnnnnnnnnnnnnnnnnnnnnnnnnnnnnnnnnnnnnnnnnnnnnnnnnnnnnnnnnnnnnnnnnnnnnnnnnnnnnnnnnnnnnnnnnnnnnnnnnnnnnnnnnnnnnnnnnnnnnnnnnnnnnnnnnnnnnnnnnnnnnnnnnnnnnnnnnnnnnnnnnnnnnnnnnnnnnnnnnnnnnnnnnnnnnnnnnnnnnnnnnnnnnnnnnnnnnnnnnnnnnnnnnnnnnnnnnnnnnnnnnnnnnnnnnnnnnnnnnnnnnnnnnnnnnnnnnnnnnnnnnnnnnnnnnnnnnnnnnnnnnnnnnnnnnnnnnnnnnnnnnnnnnnnnnnnnnnnnnnnnnnnnnnnnnnnnnnnnnnnnnnnnnnnnnnnnnnnnnnnnnnnnnnnnnnnnnnnnnnnnnnnnnnnnnnnnnnnnnnnnnnnnnnnnnnnnnnnnnnnnnnnnnnnnnnnnnnnnnnnnnnnnnnnnnnnnnnnnnnnnnnnnnnnnnnnnnnnnnnnnnnnnnnnnnnnnnnnnnnnnnnnnnnnnnnnnnnnnnnnnnnnnnnnnnnnnnnnnnnnnnnnnnnnnnnnnnnnnnnnnnnnnnnnnnnnnnnnnnnnnnnnnnnnnnnnnnnnnnnnnnnnnnnnnnnnnnnnnnnnnnnnnnnnnnnnnnnnnnnnnnnnnnnnnnnnnnnnnnnnnnnnnnnnnnnnnnnnnnnnnnnnnnnnnnnnnnnnnnnnnnnnnnnnnnnnnnnnnnnnnnnnnnnnnnnnnnnnnnnnnnnnnnnnnnnnnnnnnnnnnnnnnnnnnnnnnnnnnnnnnnnnnnnnnnnnnnnnnnnnnnnnnnnnnnnnnnnnnnnnnnnnnnnnnnnnnnnnnnnnnnnnnnnnnnnnnnnnnnnnnnnnnnnnnnnnnnnnnnnnnnnnnnnnnnnnnnnnnnnnnnnnnnnnnnnnnnnnnnnnnnnnnnnnnnnnnnnnnnnnnnnnnnnnnnnnnnnnnnnnnnnnnnnnnnnnnnnnnnnnnnnnnnnnnnnnnnnnnnnnnnnnnnnnnnnnnnnnnnnnnnnnnnnnnnnnnnnnnnnnnnnnnnnnnnnnnnnnnnnnnnnnnnnnnnnnnnnnnnnnnnnnnnnnnnnnnnnnnnnnnnnnnnnnnnnnnnnnnnnnnnnnnnnnnnnnnnnnnnnnnnnnnnnnnnnnnnnnnnnnnnnnnnnnnnnnnnnnnnnnnnnnnnnnnnnnnnnnnnnnnnnnnnnnnnnnnnnnnnnnnnnnnnnnnnnnnnnnnnnnnnnnnnnnnnnnnnnnnnnnnnnnnnnnnnnnnnnnnnnnnnnnnnnnnnnnnnnnnnnnnnnnnnnnnnnnnnnnnnnnnnnnnnnnnnnnnnnnnnnnnnnnnnnnnnnnnnnnnnnnnnnnnnnnnnnnnnnnnnnnnnnnnnnnnnnnnnnnnnnnnnnnnnnnnnnnnnnnnnnnnnnnnnnnnnnnnnnnnnnnnnnnnnnnnnnnnnnnnnnnnnnnnnnnnnnnnnnnnnnnnnnnnnnnnnnnnnnnnnnnnnnnnnnnnnnnnnnnnnnnnnnnnnnnnnnnnnnnnnnnnnnnnnnnnnnnnnnnnnnnnnnnnnnnnnnnnnnnnnnnnnnnnnnnnnnnnnnnnnnnnnnnnnnnnnnnnnnnnnnnnnnnnnnnnnnnnnnnnnnnnnnnnnnnnnnnnnnnnnnnnnnnnnnnnnnnnnnnnnnnnnnnnnnnnnnnnnnnnnnnnnnnnnnnnnnnnnnnnnnnnnnnnnnnnnnnnnnnnnnnnnnnnnnnnnnnnnnnnnnnnnnnnnnnnnnnnnnnnnnnnnnnnnnnnnnnnnnnnnnnnnnnnnnnnnnnnnnnnnnnnnnnnnnnnnnnnnnnnnnnnnnnnnnnnnnnnnnnnnnnnnnnnnnnnnnnnnnnnnnnnnnnnnnnnnnnnnnnnnnnnnnnnnnnnnnnnnnnnnnnnnnnnnnnnnnnnnnnnnnnnnnnnnnnnnnnnnnnnnnnnnnnnnnnnnnnnnnnnnnnnnnnnnnnnnnnnnnnnnnnnnnnnnnnnnnnnnnnnnnnnnnnnnnnnnnnnnnnnnnnnnnnnnnnnnnnnnnnnnnnnnnnnnnnnnnnnnnnnnnnnnnnnnnnnnnnnnnnnnnnnnnnnnnnnnnnnnnnnnnnnnnnnnnnnnnnnnnnnnnnnnnnnnnnnnnnnnnnnnnnnnnnnnnnnnnnnnnnnnnnnnnnnnnnnnnnnnnnnnnnnnnnnnnnnnnnnnnnnnnnnnnnnnnnnnnnnnnnnnnnnnnnnnnnnnnnnnnnnnnnnnnnnnnnnnnnnnnnnnnnnnnnnnnnnnnnnnnnnnnnnnnnnnnnnnnnnnnnnnnnnnnnnnnnnnnnnnnnnnnnnnnnnnnnnnnnnnnnnnnnnnnnnnnnnnnnnnnnnnnnnnnnnnnnnnnnnnnnnnnnnnnnnnnnnnnnnnnnnnnnnnnnnnnnnnnnnnnnnnnnnnnnnnnnnnnnnnnnnnnnnnnnnnnnnnnnnnnnnnnnnnnnnnnnnnnnnnnnnnnnnnnnnnnnnnnnnnnnnnnnnnnnnnnnnnnnnnnnnnnnnnnnnnnnnnnnnnnnnnnnnnnnnnnnnnnnnnnnnnnnnnnnnnnnnnnnnnnnnnnnnnnnnnnnnnnnnnnnnnnnnnnnnnnnnnnnnnnnnnnnnnnnnnnnnnnnnnnnnnnnnnnnnnnnnnnnnnnnnnnnnnnnnnnnnnnnnnnnnnnnnnnnnnnnnnnnnnnnnnnnnnnnnnnnnnnnnnnnnnnnnnnnnnnnnnnnnnnnnnnnnnnnnnnnnnnnnnnnnnnnnnnnnnnnnnnnnnnnnnnnnnnnnnnnnnnnnnnnnnnnnnnnnnnnnnnnnnnnnnnnnnnnnnnnnnnnnnnnnnnnnnnnnnnnnnnnnnnnnnnnnnnnnnnnnnnnnnnnnnnnnnnnnnnnnnnnnnnnnnnnnnnnnnnnnnnnnnnnnnnnnnnnnnnnnnnnnnnnnnnnnnnnnnnnnnnnnnnnnnnnnnnnnnnnnnnnnnnnnnnnnnnnnnnnnnnnnnnnnnnnnnnnnnnnnnnnnnnnnnnnnnnnnnnnnnnnnnnnnnnnnnnnnnnnnnnnnnnnnnnnnnnnnnnnnnnnnnnnnnnnnnnnnnnnnnnnnnnnnnnnnnnnnnnnnnnnnnnnnnnnnnnnnnnnnnnnnnnnnnnnnnnnnnnnnnnnnnnnnnnnnnnnnnnnnnnnnnnnnnnnnnnnnnnnnnnnnnnnnnnnnnnnnnnnnnnnnnnnnnnnnnnnnnnnnnnnnnnnnnnnnnnnnnnnnnnnnnnnnnnnnnnnnnnnnnnnnnnnnnnnnnnnnnnnnnnnnnnnnnnnnnnnnnnnnnnnnnnnnnnnnnnnnnnnnnnnnnnnnnnnnnnnnnnnnnnnnnnnnnnnnnnnnnnnnnnnnnnnnnnnnnnnnnnnnnnnnnnnnnnnnnnnnnnnnnnnnnnnnnnnnnnnnnnnnnnnnnnnnnnnnnnnnnnnnnnnnnnnnnnnnnnnnnnnnnnnnnnnnnnnnnnnnnnnnnnnnnnnnnnnnnnnnnnnnnnnnnnnnnnnnnnnnnnnnnnnnnnnnnnnnnnnnnnnnnnnnnnnnnnnnnnnnnnnnnnnnnnnnnnnnnnnnnnnnnnnnnnnnnnnnnnnnnnnnnnnnnnnnnnnnnnnnnnnnnnnnnnnnnnnnnnnnnnnnnnnnnnnnnnnnnnnnnnnnnnnnnnnnnnnnnnnnnnnnnnnnnnnnnnnnnnnnnnnnnnnnnnnnnnnnnnnnnnnnnnnnnnnnnnnnnnnnnnnnnnnnnnnnnnnnnnnnnnnnnnnnnnnnnnnnnnnnnnnnnnnnnnnnnnnnnnnnnnnnnnnnnnnnnnnnnnnnnnnnnnnnnnnnnnnnnnnnnnnnnnnnnnnnnnnnnnnnnnnnnnnnnnnnnnnnnnnnnnnnnnnnnnnnnnnnnnnnnnnnnnnnnnnnnnnnnnnnnnnnnnnnnnnnnnnnnnnnnnnnnnnnnnnnnnnnnnnnnnnnnnnnnnnnnnnnnnnnnnnnnnnnnnnnnnnnnnnnnnnnnnnnnnnnnnnnnnnnnnnnnnnnnnnnnnnnnnnnnnnnnnnnnnnnnnnnnnnnnnnnnnnnnnnnnnnnnnnnnnnnnnnnnnnnnnnnnnnnnnnnnnnnnnnnnnnnnnnnnnnnnnnnnnnnnnnnnnnnnnnnnnnnnnnnnnnnnnnnnnnnnnnnnnnnnnnnnnnnnnnnnnnnnnnnnnnnnnnnnnnnnnnnnnnnnnnnnnnnnnnnnnnnnnnnnnnnnnnnnnnnnnnnnnnnnnnnnnnnnnnnnnnnnnnnnnnnnnnnnnnnnnnnnnnnnnnnnnnnnnnnnnnnnnnnnnnnnnnnnnnnnnnnnnnnnnnnnnnnnnnnnnnnnnnnnnnnnnnnnnnnnnnnnnnnnnnnnnnnnnnnnnnnnnnnnnnnnnnnnnnnnnnnnnnnnnnnnnnnnnnnnnnnnnnnnnnnnnnnnnnnnnnnnnnnnnnnnnnnnnnnnnnnnnnnnnnnnnnnnnnnnnnnnnnnnnnnnnnnnnnnnnnnnnnnnnnnnnnnnnnnnnnnnnnnnnnnnnnnnnnnnnnnnnnnnnnnnnnnnnnnnnnnnnnnnnnnnnnnnnnnnnnnnnnnnnnnnnnnnnnnnnnnnnnnnnnnnnnnnnnnnnnnnnnnnnnnnnnnnnnnnnnnnnnnnnnnnnnnnnnnnnnnnnnnnnnnnnnnnnnnnnnnnnnnnnnnnnnnnnnnnnnnnnnnnnnnnnnnnnnnnnnnnnnnnnnnnnnnnnnnnnnnnnnnnnnnnnnnnnnnnnnnnnnnnnnnnnnnnnnnnnnnnnnnnnnnnnnnnnnnnnnnnnnnnnnnnnnnnnnnnnnnnnnnnnnnnnnnnnnnnnnnnnnnnnnnnnnnnnnnnnnnnnnnnnnnnnnnnnnnnnnnnnnnnnnnnnnnnnnnnnnnnnnnnnnnnnnnnnnnnnnnnnnnnnnnnnnnnnnnnnnnnnnnnnnnnnnnnnnnnnnnnnnnnnnnnnnnnnnnnnnnnnnnnnnnnnnnnnnnnnnnnnnnnnnnnnnnnnnnnnnnnnnnnnnnnnnnnnnnnnnnnnnnnnnnnnnnnnnnnnnnnnnnnnnnnnnnnnnnnnnnnnnnnnnnnnnnnnnnnnnnnnnnnnnnnnnnnnnnnnnnnnnnnnnnnnnnnnnnnnnnnnnnnnnnnnnnnnnnnnnnnnnnnnnnnnnnnnnnnnnnnnnnnnnnnnnnnnnnnnnnnnnnnnnnnnnnnnnnnnnnnnnnnnnnnnnnnnnnnnnnnnnnnnnnnnnnnnnnnnnnnnnnnnnnnnnnnnnnnnnnnnnnnnnnnnnnnnnnnnnnnnnnnnnnnnnnnnnnnnnnnnnnnnnnnnnnnnnnnnnnnnnnnnnnnnnnnnnnnnnnnnnnnnnnnnnnnnnnnnnnnnnnnnnnnnnnnnnnnnnnnnnnnnnnnnnnnnnnnnnnnnnnnnnnnnnnnnnnnnnnnnnnnnnnnnnnnnnnnnnnnnnnnnnnnnnnnnnnnnnnnnnnnnnnnnnnnnnnnnnnnnnnnnnnnnnnnnnnnnnnnnnnnnnnnnnnnnnnnnnnnnnnnnnnnnnnnnnnnnnnnnnnnnnnnnnnnnnnnnnnnnnnnnnnnnnnnnnnnnnnnnnnnnnnnnnnnnnnnnnnnnnnnnnnnnnnnnnnnnnnnnnnnnnnnnnnnnnnnnnnnnnnnnnnnnnnnnnnnnnnnnnnnnnnnnnnnnnnnnnnnnnnnnnnnnnnnnnnnnnnnnnnnnnnnnnnnnnnnnnnnnnnnnnnnnnnnnnnnnnnnnnnnnnnnnnnnnnnnnnnnnnnnnnnnnnnnnnnnnnnnnnnnnnnnnnnnnnnnnnnnnnnnnnnnnnnnnnnnnnnnnnnnnnnnnnnnnnnnnnnnnnnnnnnnnnnnnnnnnnnnnnnnnnnnnnnnnnnnnnnnnnnnnnnnnnnnnnnnnnnnnnnnnnnnnnnnnnnnnnnnnnnnnnnnnnnnnnnnnnnnnnnnnnnnnnnnnnnnnnnnnnnnnnnnnnnnnnnnnnnnnnnnnnnnnnnnnnnnnnnnnnnnnnnnnnnnnnnnnnnnnnnnnnnnnnnnnnnnnnnnnnnnnnnnnnnnnnnnnnnnnnnnnnnnnnnnnnnnnnnnnnnnnnnnnnnnnnnnnnnnnnnnnnnnnnnnnnnnnnnnnnnnnnnnnnnnnnnnnnnnnnnnnnnnnnnnnnnnnnnnnnnnnnnnnnnnnnnnnnnnnnnnnnnnnnnnnnnnnnnnnnnnnnnnnnnnnnnnnnnnnnnnnnnnnnnnnnnnnnnnnnnnnnnnnnnnnnnnnnnnnnnnnnnnnnnnnnnnnnnnnnnnnnnnnnnnnnnnnnnnnnnnnnnnnnnnnnnnnnnnnnnnnnnnnnnnnnnnnnnnnnnnnnnnnnnnnnnnnnnnnnnnnnnnnnnnnnnnnnnnnnnnnnnnnnnnnnnnnnnnnnnnnnnnnnnnnnnnnnnnnnnnnnnnnnnnnnnnnnnnnnnnnnnnnnnnnnnnnnnnnnnnnnnnnnnnnnnnnnnnnnnnnnnnnnnnnnnnnnnnnnnnnnnnnnnnnnnnnnnnnnnnnnnnnnnnnnnnnnnnnnnnnnnnnnnnnnnnnnnnnnnnnnnnnnnnnnnnnnnnnnnnnnnnnnnnnnnnnnnnnnnnnnnnnnnnnnnnnnnnnnnnnnnnnnnnnnnnnnnnnnnnnnnnnnnnnnnnnnnnnnnnnnnnnnnnnnnnnnnnnnnnnnnnnnnnnnnnnnnnnnnnnnnnnnnnnnnnnnnnnnnnnnnnnnnnnnnnnnnnnnnnnnnnnnnnnnnnnnnnnnnnnnnnnnnnnnnnnnnnnnnnnnnnnnnnnnnnnnnnnnnnnnnnnnnnnnnnnnnnnnnnnnnnnnnnnnnnnnnnnnnnnnnnnnnnnnnnnnnnnnnnnnnnnnnnnnnnnnnnnnnnnnnnnnnnnnnnnnnnnnnnnnnnnnnnnnnnnnnnnnnnnnnnnnnnnnnnnnnnnnnnnnnnnnnnnnnnnnnnnnnnnnnnnnnnnnnnnnnnnnnnnnnnnnnnnnnnnnnnnnnnnnnnnnnnnnnnnnnnnnnnnnnnnnnnnnnnnnnnnnnnnnnnnnnnnnnnnnnnnnnnnnnnnnnnnnnnnnnnnnnnnnnnnnnnnnnnnnnnnnnnnnnnnnnnnnnnnnnnnnnnnnnnnnnnnnnnnnnnnnnnnnnnnnnnnnnnnnnnnnnnnnnnnnnnnnnnnnnnnnnnnnnnnnnnnnnnnnnnnnnnnnnnnnnnnnnnnnnnnnnnnnnnnnnnnnnnnnnnnnnnnnnnnnnnnnnnnnnnnnnnnnnnnnnnnnnnnnnnnnnnnnnnnnnnnnnnnnnnnnnnnnnnnnnnnnnnnnnnnnnnnnnnnnnnnnnnnnnnnnnnnnnnnnnnnnnnnnnnnnnnnnnnnnnnnnnnnnnnnnnnnnnnnnnnnnnnnnnnnnnnnnnnnnnnnnnnnnnnnnnnnnnnnnnnnnnnnnnnnnnnnnnnnnnnnnnnnnnnnnnnnnnnnnnnnnnnnnnnnnnnnnnnnnnnnnnnnnnnnnnnnnnnnnnnnnnnnnnnnnnnnnnnnnnnnnnnnnnnnnnnnnnnnnnnnnnnnnnnnnnnnnnnnnnnnnnnnnnnnnnnnnnnnnnnnnnnnnnnnnnnnnnnnnnnnnnnnnnnnnnnnnnnnnnnnnnnnnnnnnnnnnnnnnnnnnnnnnnnnnnnnnnnnnnnnnnnnnnnnnnnnnnnnnnnnnnnnnnnnnnnnnnnnnnnnnnnnnnnnnnnnnnnnnnnnnnnnnnnnnnnnnnnnnnnnnnnnnnnnnnnnnnnnnnnnnnnnnnnnnnnnnnnnnnnnnnnnnnnnnnnnnnnnnnnnnnnnnnnnnnnnnnnnnnnnnnnnnnnnnnnnnnnnnnnnnnnnnnnnnnnnnnnnnnnnnnnnnnnnnnnnnnnnnnnnnnnnnnnnnnnnnnnnnnnnnnnnnnnnnnnnnnnnnnnnnnnnnnnnnnnnnnnnnnnnnnnnnnnnnnnnnnnnnnnnnnnnnnnnnnnnnnnnnnnnnnnnnnnnnnnnnnnnnnnnnnnnnnnnnnnnnnnnnnnnnnnnnnnnnnnnnnnnnnnnnnnnnnnnnnnnnnnnnnnnnnnnnnnnnnnnnnnnnnnnnnnnnnnnnnnnnnnnnnnnnnnnnnnnnnnnnnnnnnnnnnnnnnnnnnnnnnnnnnnnnnnnnnnnnnnnnnnnnnnnnnnnnnnnnnnnnnnnnnnnnnnnnnnnnnnnnnnnnnnnnnnnnnnnnnnnnnnnnnnnnnnnnnnnnnnnnnnnnnnnnnnnnnnnnnnnnnnnnnnnnnnnnnnnnnnnnnnnnnnnnnnnnnnnnnnnnnnnnnnnnnnnnnnnnnnnnnnnnnnnnnnnnnnnnnnnnnnnnnnnnnnnnnnnnnnnnnnnnnnnnnnnnnnnnnnnnnnnnnnnnnnnnnnnnnnnnnnnnnnnnnnnnnnnnnnnnnnnnnnnnnnnnnnnnnnnnnnnnnnnnnnnnnnnnnnnnnnnnnnnnnnnnnnnnnnnnnnnnnnnnnnnnnnnnnnnnnnnnnnnnnnnnnnnnnnnnnnnnnnnnnnnnnnnnnnnnnnnnnnnnnnnnnnnnnnnnnnnnnnnnnnnnnnnnnnnnnnnnnnnnnnnnnnnnnnnnnnnnnnnnnnnnnnnnnnnnnnnnnnnnnnnnnnnnnnnnnnnnnnnnnnnnnnnnnnnnnnnnnnnnnnnnnnnnnnnnnnnnnnnnnnnnnnnnnnnnnnnnnnnnnnnnnnnnnnnnnnnnnnnnnnnnnnnnnnnnnnnnnnnnnnnnnnnnnnnnnnnnnnnnnnnnnnnnnnnnnnnnnnnnnnnnnnnnnnnnnnnnnnnnnnnnnnnnnnnnnnnnnnnnnnnnnnnnnnnnnnnnnnnnnnnnnnnnnnnnnnnnnnnnnnnnnnnnnnnnnnnnnnnnnnnnnnnnnnnnnnnnnnnnnnnnnnnnnnnnnnnnnnnnnnnnnnnnnnnnnnnnnnnnnnnnnnnnnnnnnnnnnnnnnnnnnnnnnnnnnnnnnnnnnnnnnnnnnnnnnnnnnnnnnnnnnnnnnnnnnnnnnnnnnnnnnnnnnnnnnnnnnnnnnnnnnnnnnnnnnnnnnnnnnnnnnnnnnnnnnnnnnnnnnnnnnnnnnnnnnnnnnnnnnnnnnnnnnnnnnnnnnnnnnnnnnnnnnnnnnnnnnnnnnnnnnnnnnnnnnnnnnnnnnnnnnnnnnnnnnnnnnnnnnnnnnnnnnnnnnnnnnnnnnnnnnnnnnnnnnnnnnnnnnnnnnnnnnnnnnnnnnnnnnnnnnnnnnnnnnnnnnnnnnnnnnnnnnnnnnnnnnnnnnnnnnnnnnnnnnnnnnnnnnnnnnnnnnnnnnnnnnnnnnnnnnnnnnnnnnnnnnnnnnnnnnnnnnnnnnnnnnnnnnnnnnnnnnnnnnnnnnnnnnnnnnnnnnnnnnnnnnnnnnnnnnnnnnnnnnnnnnnnnnnnnnnnnnnnnnnnnnnnnnnnnnnnnnnnnnnnnnnnnnnnnnnnnnnnnnnnnnnnnnnnnnnnnnnnnnnnnnnnnnnnnnnnnnnnnnnnnnnnnnnnnnnnnnnnnnnnnnnnnnnnnnnnnnnnnnnnnnnnnnnnnnnnnnnnnnnnnnnnnnnnnnnnnnnnnnnnnnnnnnnnnnnnnnnnnnnnnnnnnnnnnnnnnnnnnnnnnnnnnnnnnnnnnnnnnnnnnnnnnnnnnnnnnnnnnnnnnnnnnnnnnnnnnnnnnnnnnnnnnnnnnnnnnnnnnnnnnnnnnnnnnnnnnnnnnnnnnnnnnnnnnnnnnnnnnnnnnnnnnnnnnnnnnnnnnnnnnnnnnnnnnnnnnnnnnnnnnnnnnnnnnnnnnnnnnnnnnnnnnnnnnnnnnnnnnnnnnnnnnnnnnnnnnnnnnnnnnnnnnnnnnnnnnnnnnnnnnnnnnnnnnnnnnnnnnnnnnnnnnnnnnnnnnnnnnnnnnnnnnnnnnnnnnnnnnnnnnnnnnnnnnnnnnnnnnnnnnnnnnnnnnnnnnnnnnnnnnnnnnnnnnnnnnnnnnnnnnnnnnnnnnnnnnnnnnnnnnnnnnnnnnnnnnnnnnnnnnnnnnnnnnnnnnnnnnnnnnnnnnnnnnnnnnnnnnnnnnnnnnnnnnnnnnnnnnnnnnnnnnnnnnnnnnnnnnnnnnnnnnnnnnnnnnnnnnnnnnnnnnnnnnnnnnnnnnnnnnnnnnnnnnnnnnnnnnnnnnnnnnnnnnnnnnnnnnnnnnnnnnnnnnnnnnnnnnnnnnnnnnnnnnnnnnnnnnnnnnnnnnnnnnnnnnnnnnnnnnnnnnnnnnnnnnnnnnnnnnnnnnnnnnnnnnnnnnnnnnnnnnnnnnnnnnnnnnnnnnnnnnnnnnnnnnnnnnnnnnnnnnnnnnnnnnnnnnnnnnnnnnnnnnnnnnnnnnnnnnnnnnnnnnnnnnnnnnnnnnnnnnnnnnnnnnnnnnnnnnnnnnnnnnnnnnnnnnnnnnnnnnnnnnnnnnnnnnnnnnnnnnnnnnnnnnnnnnnnnnnnnnnnnnnnnnnnnnnnnnnnnnnnnnnnnnnnnnnnnnnnnnnnnnnnnnnnnnnnnnnnnnnnnnnnnnnnnnnnnnnnnnnnnnnnnnnnnnnnnnnnnnnnnnnnnnnnnnnnnnnnnnnnnnnnnnnnnnnnnnnnnnnnnnnnnnnnnnnnnnnnnnnnnnnnnnnnnnnnnnnnnnnnnnnnnnnnnnnnnnnnnnnnnnnnnnnnnnnnnnnnnnnnnnnnnnnnnnnnnnnnnnnnnnnnnnnnnnnnnnnnnnnnnnnnnnnnnnnnnnnnnnnnnnnnnnnnnnnnnnnnnnnnnnnnnnnnnnnnnnnnnnnnnnnnnnnnnnnnnnnnnnnnnnnnnnnnnnnnnnnnnnnnnnnnnnnnnnnnnnnnnnnnnnnnnnnnnnnnnnnnnnnnnnnnnnnnnnnnnnnnnnnnnnnnnnnnnnnnnnnnnnnnnnnnnnnnnnnnnnnnnnnnnnnnnnnnnnnnnnnnnnnnnnnnnnnnnnnnnnnnnnnnnnnnnnnnnnnnnnnnnnnnnnnnnnnnnnnnnnnnnnnnnnnnnnnnnnnnnnnnnnnnnnnnnnnnnnnnnnnnnnnnnnnnnnnnnnnnnnnnnnnnnnnnnnnnnnnnnnnnnnnnnnnnnnnnnnnnnnnnnnnnnnnnnnnnnnnnnnnnnnnnnnnnnnnnnnnnnnnnnnnnnnnnnnnnnnnnnnnnnnnnnnnnnnnnnnnnnnnnnnnnnnnnnnnnnnnnnnnnnnnnnnnnnnnnnnnnnnnnnnnnnnnnnnnnnnnnnnnnnnnnnnnnnnnnnnnnnnnnnnnnnnnnnnnnnnnnnnnnnnnnnnnnnnnnnnnnnnnnnnnnnnnnnnnnnnnnnnnnnnnnnnnnnnnnnnnnnnnnnnnnnnnnnnnnnnnnnnnnnnnnnnnnnnnnnnnnnnnnnnnnnnnnnnnnnnnnnnnnnnnnnnnnnnnnnnnnnnnnnnnnnnnnnnnnnnnnnnnnnnnnnnnnnnnnnnnnnnnnnnnnnnnnnnnnnnnnnnnnnnnnnnnnnnnnnnnnnnnnnnnnnnnnnnnnnnnnnnnnnnnnnnnnnnnnnnnnnnnnnnnnnnnnnnnnnnnnnnnnnnnnnnnnnnnnnnnnnnnnnnnnnnnnnnnnnnnnnnnnnnnnnnnnnnnnnnnnnnnnnnnnnnnnnnnnnnnnnnnnnnnnnnnnnnnnnnnnnnnnnnnnnnnnnnnnnnnnnnnnnnnnnnnnnnnnnnnnnnnnnnnnnnnnnnnnnnnnnnnnnnnnnnnnnnnnnnnnnnnnnnnnnnnnnnnnnnnnnnnnnnnnnnnnnnnnnnnnnnnnnnnnnnnnnnnnnnnnnnnnnnnnnnnnnnnnnnnnnnnnnnnnnnnnnnnnnnnnnnnnnnnnnnnnnnnnnnnnnnnnnnnnnnnnnnnnnnnnnnnnnnnnnnnnnnnnnnnnnnnnnnnnnnnnnnnnnnnnnnnnnnnnnnnnnnnnnnnnnnnnnnnnnnnnnnnnnnnnnnnnnnnnnnnnnnnnnnnnnnnnnnnnnnnnnnnnnnnnnnnnnnnnnnnnnnnnnnnnnnnnnnnnnnnnnnnnnnnnnnnnnnnnnnnnnnnnnnnnnnnnnnnnnnnnnnnnnnnnnnnnnnnnnnnnnnnnnnnnnnnnnnnnnnnnnnnnnnnnnnnnnnnnnnnnnnnnnnnnnnnnnnnnnnnnnnnnnnnnnnnnnnnnnnnnnnnnnnnnnnnnnnnnnnnnnnnnnnnnnnnnnnnnnnnnnnnnnnnnnnnnnnnnnnnnnnnnnnnnnnnnnnnnnnnnnnnnnnnnnnnnnnnnnnnnnnnnnnnnnnnnnnnnnnnnnnnnnnnnnnnnnnnnnnnnnnnnnnnnnnnnnnnnnnnnnnnnnnnnnnnnnnnnnnnnnnnnnnnnnnnnnnnnnnnnnnnnnnnnnnnnnnnnnnnnnnnnnnnnnnnnnnnnnnnnnnnnnnnnnnnnnnnnnnnnnnnnnnnnnnnnnnnnnnnnnnnnnnnnnnnnnnnnnnnnnnnnnnnnnnnnnnnnnnnnnnnnnnnnnnnnnnnnnnnnnnnnnnnnnnnnnnnnnnnnnnnnnnnnnnnnnnnnnnnnnnnnnnnnnnnnnnnnnnnnnnnnnnnnnnnnnnnnnnnnnnnnnnnnnnnnnnnnnnnnnnnnnnnnnnnnnnnnnnnnnnnnnnnnnnnnnnnnnnnnnnnnnnnnnnnnnnnnnnnnnnnnnnnnnnnnnnnnnnnnnnnnnnnnnnnnnnnnnnnnnnnnnnnnnnnnnnnnnnnnnnnnnnnnnnnnnnnnnnnnnnnnnnnnnnnnnnnnnnnnnnnnnnnnnnnnnnnnnnnnnnnnnnnnnnnnnnnnnnnnnnnnnnnnnnnnnnnnnnnnnnnnnnnnnnnnnnnnnnnnnnnnnnnnnnnnnnnnnnnnnnnnnnnnnnnnnnnnnnnnnnnnnnnnnnnnnnnnnnnnnnnnnnnnnnnnnnnnnnnnnnnnnnnnnnnnnnnnnnnnnnnnnnnnnnnnnnnnnnnnnnnnnnnnnnnnnnnnnnnnnnnnnnnnnnnnnnnnnnnnnnnnnnnnnnnnnnnnnnnnnnnnnnnnnnnnnnnnnnnnnnnnnnnnnnnnnnnnnnnnnnnnnnnnnnnnnnnnnnnnnnnnnnnnnnnnnnnnnnnnnnnnnnnnnnnnnnnnnnnnnnnnnnnnnnnnnnnnnnnnnnnnnnnnnnnnnnnnnnnnnnnnnnnnnnnnnnnnnnnnnnnnnnnnnnnnnnnnnnnnnnnnnnnnnnnnnnnnnnnnnnnnnnnnnnnnnnnnnnnnnnnnnnnnnnnnnnnnnnnnnnnnnnnnnnnnnnnnnnnnnnnnnnnnnnnnnnnnnnnnnnnnnnnnnnnnnnnnnnnnnnnnnnnnnnnnnnnnnnnnnnnnnnnnnnnnnnnnnnnnnnnnnnnnnnnnnnnnnnnnnnnnnnnnnnnnnnnnnnnnnnnnnnnnnnnnnnnnnnnnnnnnnnnnnnnnnnnnnnnnnnnnnnnnnnnnnnnnnnnnnnnnnnnnnnnnnnnnnnnnnnnnnnnnnnnnnnnnnnnnnnnnnnnnnnnnnnnnnnnnnnnnnnnnnnnnnnnnnnnnnnnnnnnnnnnnnnnnnnnnnnnnnnnnnnnnnnnnnnnnnnnnnnnnnnnnnnnnnnnnnnnnnnnnnnnnnnnnnnnnnnnnnnnnnnnnnnnnnnnnnnnnnnnnnnnnnnnnnnnnnnnnnnnnnnnnnnnnnnnnnnnnnnnnnnnnnnnnnnnnnnnnnnnnnnnnnnnnnnnnnnnnnnnnnnnnnnnnnnnnnnnnnnnnnnnnnnnnnnnnnnnnnnnnnnnnnnnnnnnnnnnnnnnnnnnnnnnnnnnnnnnnnnnnnnnnnnnnnnnnnnnnnnnnnnnnnnnnnnnnnnnnnnnnnnnnnnnnnnnnnnnnnnnnnnnnnnnnnnnnnnnnnnnnnnnnnnnnnnnnnnnnnnnnnnnnnnnnnnnnnnnnnnnnnnnnnnnnnnnnnnnnnnnnnnnnnnnnnnnnnnnnnnnnnnnnnnnnnnnnnnnnnnnnnnnnnnnnnnnnnnnnnnnnnnnnnnnnnnnnnnnnnnnnnnnnnnnnnnnnnnnnnnnnnnnnnnnnnnnnnnnnnnnnnnnnnnnnnnnnnnnnnnnnnnnnnnnnnnnnnnnnnnnnnnnnnnnnnnnnnnnnnnnnnnnnnnnnnnnnnnnnnnnnnnnnnnnnnnnnnnnnnnnnnnnnnnnnnnnnnnnnnnnnnnnnnnnnnnnnnnnnnnnnnnnnnnnnnnnnnnnnnnnnnnnnnnnnnnnnnnnnnnnnnnnnnnnnnnnnnnnnnnnnnnnnnnnnnnnnnnnnnnnnnnnnnnnnnnnnnnnnnnnnnnnnnnnnnnnnnnnnnnnnnnnnnnnnnnnnnnnnnnnnnnnnnnnnnnnnnnnnnnnnnnnnnnnnnnnnnnnnnnnnnnnnnnnnnnnnnnnnnnnnnnnnnnnnnnnnnnnnnnnnnnnnnnnnnnnnnnnnnnnnnnnnnnnnnnnnnnnnnnnnnnnnnnnnnnnnnnnnnnnnnnnnnnnnnnnnnnnnnnnnnnnnnnnnnnnnnnnnnnnnnnnnnnnnnnnnnnnnnnnnnnnnnnnnnnnnnnnnnnnnnnnnnnnnnnnnnnnnnnnnnnnnnnnnnnnnnnnnnnnnnnnnnnnnnnnnnnnnnnnnnnnnnnnnnnnnnnnnnnnnnnnnnnnnnnnnnnnnnnnnnnnnnnnnnnnnnnnnnnnnnnnnnnnnnnnnnnnnnnnnnnnnnnnnnnnnnnnnnnnnnnnnnnnnnnnnnnnnnnnnnnnnnnnnnnnnnnnnnnnnnnnnnnnnnnnnnnnnnnnnnnnnnnnnnnnnnnnnnnnnnnnnnnnnnnnnnnnnnnnnnnnnnnnnnnnnnnnnnnnnnnnnnnnnnnnnnnnnnnnnnnnnnnnnnnnnnnnnnnnnnnnnnnnnnnnnnnnnnnnnnnnnnnnnnnnnnnnnnnnnnnnnnnnnnnnnnnnnnnnnnnnnnnnnnnnnnnnnnnnnnnnnnnnnnnnnnnnnnnnnnnnnnnnnnnnnnnnnnnnnnnnnnnnnnnnnnnnnnnnnnnnnnnnnnnnnnnnnnnnnnnnnnnnnnnnnnnnnnnnnnnnnnnnnnnnnnnnnnnnnnnnnnnnnnnnnnnnnnnnnnnnnnnnnnnnnnnnnnnnnnnnnnnnnnnnnnnnnnnnnnnnnnnnnnnnnnnnnnnnnnnnnnnnnnnnnnnnnnnnnnnnnnnnnnnnnnnnnnnnnnnnnnnnnnnnnnnnnnnnnnnnnnnnnnnnnnnnnnnnnnnnnnnnnnnnnnnnnnnnnnnnnnnnnnnnnnnnnnnnnnnnnnnnnnnnnnnnnnnnnnnnnnnnnnnnnnnnnnnnnnnnnnnnnnnnnnnnnnnnnnnnnnnnnnnnnnnnnnnnnnnnnnnnnnnnnnnnnnnnnnnnnnnnnnnnnnnnnnnnnnnnnnnnnnnnnnnnnnnnnnnnnnnnnnnnnnnnnnnnnnnnnnnnnnnnnnnnnnnnnnnnnnnnnnnnnnnnnnnnnnnnnnnnnnnnnnnnnnnnnnnnnnnnnnnnnnnnnnnnnnnnnnnnnnnnnnnnnnnnnnnnnnnnnnnnnnnnnnnnnnnnnnnnnnnnnnnnnnnnnnnnnnnnnnnnnnnnnnnnnnnnnnnnnnnnnnnnnnnnnnnnnnnnnnnnnnnnnnnnnnnnnnnnnnnnnnnnnnnnnnnnnnnnnnnnnnnnnnnnnnnnnnnnnnnnnnnnnnnnnnnnnnnnnnnnnnnnnnnnnnnnnnnnnnnnnnnnnnnnnnnnnnnnnnnnnnnnnnnnnnnnnnnnnnnnnnnnnnnnnnnnnnnnnnnnnnnnnnnnnnnnnnnnnnnnnnnnnnnnnnnnnnnnnnnnnnnnnnnnnnnnnnnnnnnnnnnnnnnnnnnnnnnnnnnnnnnnnnnnnnnnnnnnnnnnnnnnnnnnnnnnnnnnnnnnnnnnnnnnnnnnnnnnnnnnnnnnnnnnnnnnnnnnnnnnnnnnnnnnnnnnnnnnnnnnnnnnnnnnnnnnnnnnnnnnnnnnnnnnnnnnnnnnnnnnnnnnnnnnnnnnnnnnnnnnnnnnnnnnnnnnnnnnnnnnnnnnnnnnnnnnnnnnnnnnnnnnnnnnnnnnnnnnnnnnnnnnnnnnnnnnnnnnnnnnnnnnnnnnnnnnnnnnnnnnnnnnnnnnnnnnnnnnnnnnnnnnnnnnnnnnnnnnnnnnnnnnnnnnnnnnnnnnnnnnnnnnnnnnnnnnnnnnnnnnnnnnnnnnnnnnnnnnnnnnnnnnnnnnnnnnnnnnnnnnnnnnnnnnnnnnnnnnnnnnnnnnnnnnnnnnnnnnnnnnnnnnnnnnnnnnnnnnnnnnnnnnnnnnnnnnnnnnnnnnnnnnnnnnnnnnnnnnnnnnnnnnnnnnnnnnnnnnnnnnnnnnnnnnnnnnnnnnnnnnnnnnnnnnnnnnnnnnnnnnnnnnnnnnnnnnnnnnnnnnnnnnnnnnnnnnnnnnnnnnnnnnnnnnnnnnnnnnnnnnnnnnnnnnnnnnnnnnnnnnnnnnnnnnnnnnnnnnnnnnnnnnnnnnnnnnnnnnnnnnnnnnnnnnnnnnnnnnnnnnnnnnnnnnnnnnnnnnnnnnnnnnnnnnnnnnnnnnnnnnnnnnnnnnnnnnnnnnnnnnnnnnnnnnnnnnnnnnnnnnnnnnnnnnnnnnnnnnnnnnnnnnnnnnnnnnnnnnnnnnnnnnnnnnnnnnnnnnnnnnnnnnnnnnnnnnnnnnnnnnnnnnnnnnnnnnnnnnnnnnnnnnnnnnnnnnnnnnnnnnnnnnnnnnnnnnnnnnnnnnnnnnnnnnnnnnnnnnnnnnnnnnnnnnnnnnnnnnnnnnnnnnnnnnnnnnnnnnnnnnnnnnnnnnnnnnnnnnnnnnnnnnnnnnnnnnnnnnnnnnnnnnnnnnnnnnnnnnnnnnnnnnnnnnnnnnnnnnnnnnnnnnnnnnnnnnnnnnnnnnnnnnnnnnnnnnnnnnnnnnnnnnnnnnnnnnnnnnnnnnnnnnnnnnnnnnnnnnnnnnnnnnnnnnnnnnnnnnnnnnnnnnnnnnnnnnnnnnnnnnnnnnnnnnnnnnnnnnnnnnnnnnnnnnnnnnnnnnnnnnnnnnnnnnnnnnnnnnnnnnnnnnnnnnnnnnnnnnnnnnnnnnnnnnnnnnnnnnnnnnnnnnnnnnnnnnnnnnnnnnnnnnnnnnnnnnnnnnnnnnnnnnnnnnnnnnnnnnnnnnnnnnnnnnnnnnnnnnnnnnnnnnnnnnnnnnnnnnnnnnnnnnnnnnnnnnnnnnnnnnnnnnnnnnnnnnnnnnnnnnnnnnnnnnnnnnnnnnnnnnnnnnnnnnnnnnnnnnnnnnnnnnnnnnnnnnnnnnnnnnnnnnnnnnnnnnnnnnnnnnnnnnnnnnnnnnnnnnnnnnnnnnnnnnnnnnnnnnnnnnnnnnnnnnnnnnnnnnnnnnnnnnnnnnnnnnnnnnnnnnnnnnnnnnnnnnnnnnnnnnnnnnnnnnnnnnnnnnnnnnnnnnnnnnnnnnnnnnnnnnnnnnnnnnnnnnnnnnnnnnnnnnnnnnnnnnnnnnnnnnnnnnnnnnnnnnnnnnnnnnnnnnnnnnnnnnnnnnnnnnnnnnnnnnnnnnnnnnnnnnnnnnnnnnnnnnnnnnnnnnnnnnnnnnnnnnnnnnnnnnnnnnnnnnnnnnnnnnnnnnnnnnnnnnnnnnnnnnnnnnnnnnnnnnnnnnnnnnnnnnnnnnnnnnnnnnnnnnnnnnnnnnnnnnnnnnnnnnnnnnnnnnnnnnnnnnnnnnnnnnnnnnnnnnnnnnnnnnnnnnnnnnnnnnnnnnnnnnnnnnnnnnnnnnnnnnnnnnnnnnnnnnnnnnnnnnnnnnnnnnnnnnnnnnnnnnnnnnnnnnnnnnnnnnnnnnnnnnnnnnnnnnnnnnnnnnnnnnnnnnnnnnnnnnnnnnnnnnnnnnnnnnnnnnnnnnnnnnnnnnnnnnnnnnnnnnnnnnnnnnnnnnnnnnnnnnnnnnnnnnnnnnnnnnnnnnnnnnnnnnnnnnnnnnnnnnnnnnnnnnnnnnnnnnnnnnnnnnnnnnnnnnnnnnnnnnnnnnnnnnnnnnnnnnnnnnnnnnnnnnnnnnnnnnnnnnnnnnnnnnnnnnnnnnnnnnnnnnnnnnnnnnnnnnnnnnnnnnnnnnnnnnnnnnnnnnnnnnnnnnnnnnnnnnnnnnnnnnnnnnnnnnnnnnnnnnnnnnnnnnnnnnnnnnnnnnnnnnnnnnnnnnnnnnnnnnnnnnnnnnnnnnnnnnnnnnnnnnnnnnnnnnnnnnnnnnnnnnnnnnnnnnnnnnnnnnnnnnnnnnnnnnnnnnnnnnnnnnnnnnnnnnnnnnnnnnnnnnnnnnnnnnnnnnnnnnnnnnnnnnnnnnnnnnnnnnnnnnnnnnnnnnnnnnnnnnnnnnnnnnnnnnnnnnnnnnnnnnnnnnnnnnnnnnnnnnnnnnnnnnnnnnnnnnnnnnnnnnnnnnnnnnnnnnnnnnnnnnnnnnnnnnnnnnnnnnnnnnnnnnnnnnnnnnnnnnnnnnnnnnnnnnnnnnnnnnnnnnnnnnnnnnnnnnnnnnnnnnnnnnnnnnnnnnnnnnnnnnnnnnnnnnnnnnnnnnnnnnnnnnnnnnnnnnnnnnnnnnnnnnnnnnnnnnnnnnnnnnnnnnnnnnnnnnnnnnnnnnnnnnnnnnnnnnnnnnnnnnnnnnnnnnnnnnnnnnnnnnnnnnnnnnnnnnnnnnnnnnnnnnnnnnnnnnnnnnnnnnnnnnnnnnnnnnnnnnnnnnnnnnnnnnnnnnnnnnnnnnnnnnnnnnnnnnnnnnnnnnnnnnnnnnnnnnnnnnnnnnnnnnnnnnnnnnnnnnnnnnnnnnnnnnnnnnnnnnnnnnnnnnnnnnnnnnnnnnnnnnnnnnnnnnnnnnnnnnnnnnnnnnnnnnnnnnnnnnnnnnnnnnnnnnnnnnnnnnnnnnnnnnnnnnnnnnnnnnnnnnnnnnnnnnnnnnnnnnnnnnnnnnnnnnnnnnnnnnnnnnnnnnnnnnnnnnnnnnnnnnnnnnnnnnnnnnnnnnnnnnnnnnnnnnnnnnnnnnnnnnnnnnnnnnnnnnnnnnnnnnnnnnnnnnnnnnnnnnnnnnnnnnnnnnnnnnnnnnnnnnnnnnnnnnnnnnnnnnnnnnnnnnnnnnnnnnnnnnnnnnnnnnnnnnnnnnnnnnnnnnnnnnnnnnnnnnnnnnnnnnnnnnnnnnnnnnnnnnnnnnnnnnnnnnnnnnnnnnnnnnnnnnnnnnnnnnnnnnnnnnnnnnnnnnnnnnnnnnnnnnnnnnnnnnnnnnnnnnnnnnnnnnnnnnnnnnnnnnnnnnnnnnnnnnnnnnnnnnnnnnnnnnnnnnnnnnnnnnnnnnnnnnnnnnnnnnnnnnnnnnnnnnnnnnnnnnnnnnnnnnnnnnnnnnnnnnnnnnnnnnnnnnnnnnnnnnnnnnnnnnnnnnnnnnnnnnnnnnnnnnnnnnnnnnnnnnnnnnnnnnnnnnnnnnnnnnnnnnnnnnnnnnnnnnnnnnnnnnnnnnnnnnnnnnnnnnnnnnnnnnnnnnnnnnnnnnnnnnnnnnnnnnnnnnnnnnnnnnnnnnnnnnnnnnnnnnnnnnnnnnnnnnnnnnnnnnnnnnnnnnnnnnnnnnnnnnnnnnnnnnnnnnnnnnnnnnnnnnnnnnnnnnnnnnnnnnnnnnnnnnnnnnnnnnnnnnnnnnnnnnnnnnnnnnnnnnnnnnnnnnnnnnnnnnnnnnnnnnnnnnnnnnnnnnnnnnnnnnnnnnnnnnnnnnnnnnnnnnnnnnnnnnnnnnnnnnnnnnnnnnnnnnnnnnnnnnnnnnnnnnnnnnnnnnnnnnnnnnnnnnnnnnnnnnnnnnnnnnnnnnnnnnnnnnnnnnnnnnnnnnnnnnnnnnnnnnnnnnnnnnnnnnnnnnnnnnnnnnnnnnnnnnnnnnnnnnnnnnnnnnnnnnnnnnnnnnnnnnnnnnnnnnnnnnnnnnnnnnnnnnnnnnnnnnnnnnnnnnnnnnnnnnnnnnnnnnnnnnnnnnnnnnnnnnnnnnnnnnnnnnnnnnnnnnnnnnnnnnnnnnnnnnnnnnnnnnnnnnnnnnnnnnnnnnnnnnnnnnnnnnnnnnnnnnnnnnnnnnnnnnnnnnnnnnnnnnnnnnnnnnnnnnnnnnnnnnnnnnnnnnnnnnnnnnnnnnnnnnnnnnnnnnnnnnnnnnnnnnnnnnnnnnnnnnnnnnnnnnnnnnnnnnnnnnnnnnnnnnnnnnnnnnnnnnnnnnnnnnnnnnnnnnnnnnnnnnnnnnnnnnnnnnnnnnnnnnnnnnnnnnnnnnnnnnnnnnnnnnnnnnnnnnnnnnnnnnnnnnnnnnnnnnnnnnnnnnnnnnnnnnnnnnnnnnnnnnnnnnnnnnnnnnnnnnnnnnnnnnnnnnnnnnnnnnnnnnnnnnnnnnnnnnnnnnnnnnnnnnnnnnnnnnnnnnnnnnnnnnnnnnnnnnnnnnnnnnnnnnnnnnnnnnnnnnnnnnnnnnnnnnnnnnnnnnnnnnnnnnnnnnnnnnnnnnnnnnnnnnnnnnnnnnnnnnnnnnnnnnnnnnnnnnnnnnnnnnnnnnnnnnnnnnnnnnnnnnnnnnnnnnnnnnnnnnnnnnnnnnnnnnnnnnnnnnnnnnnnnnnnnnnnnnnnnnnnnnnnnnnnnnnnnnnnnnnnnnnnnnnnnnnnnnnnnnnnnnnnnnnnnnnnnnnnnnnnnnnnnnnnnnnnnnnnnnnnnnnnnnnnnnnnnnnnnnnnnnnnnnnnnnnnnnnnnnnnnnnnnnnnnnnnnnnnnnnnnnnnnnnnnnnnnnnnnnnnnnnnnnnnnnnnnnnnnnnnnnnnnnnnnnnnnnnnnnnnnnnnnnnnnnnnnnnnnnnnnnnnnnnnnnnnnnnnnnnnnnnnnnnnnnnnnnnnnnnnnnnnnnnnnnnnnnnnnnnnnnnnnnnnnnnnnnnnnnnnnnnnnnnnnnnnnnnnnnnnnnnnnnnnnnnnnnnnnnnnnnnnnnnnnnnnnnnnnnnnnnnnnnnnnnnnnnnnnnnnnnnnnnnnnnnnnnnnnnnnnnnnnnnnnnnnnnnnnnnnnnnnnnnnnnnnnnnnnnnnnnnnnnnnnnnnnnnnnnnnnnnnnnnnnnnnnnnnnnnnnnnnnnnnnnnnnnnnnnnnnnnnnnnnnnnnnnnnnnnnnnnnnnnnnnnnnnnnnnnnnnnnnnnnnnnnnnnnnnnnnnnnnnnnnnnnnnnnnnnnnnnnnnnnnnnnnnnnnnnnnnnnnnnnnnnnnnnnnnnnnnnnnnnnnnnnnnnnnnnnnnnnnnnnnnnnnnnnnnnnnnnnnnnnnnnnnnnnnnnnnnnnnnnnnnnnnnnnnnnnnnnnnnnnnnnnnnnnnnnnnnnnnnnnnnnnnnnnnnnnnnnnnnnnnnnnnnnnnnnnnnnnnnnnnnnnnnnnnnnnnnnnnnnnnnnnnnnnnnnnnnnnnnnnnnnnnnnnnnnnnnnnnnnnnnnnnnnnnnnnnnnnnnnnnnnnnnnnnnnnnnnnnnnnnnnnnnnnnnnnnnnnnnnnnnnnnnnnnnnnnnnnnnnnnnnnnnnnnnnnnnnnnnnnnnnnnnnnnnnnnnnnnnnnnnnnnnnnnnnnnnnnnnnnnnnnnnnnnnnnnnnnnnnnnnnnnnnnnnnnnnnnnnnnnnnnnnnnnnnnnnnnnnnnnnnnnnnnnnnnnnnnnnnnnnnnnnnnnnnnnnnnnnnnnnnnnnnnnnnnnnnnnnnnnnnnnnnnnnnnnnnnnnnnnnnnnnnnnnnnnnnnnnnnnnnnnnnnnnnnnnnnnnnnnnnnnnnnnnnnnnnnnnnnnnnnnnnnnnnnnnnnnnnnnnnnnnnnnnnnnnnnnnnnnnnnnnnnnnnnnnnnnnnnnnnnnnnnnnnnnnnnnnnnnnnnnnnnnnnnnnnnnnnnnnnnnnnnnnnnnnnnnnnnnnnnnnnnnnnnnnnnnnnnnnnnnnnnnnnnnnnnnnnnnnnnnnnnnnnnnnnnnnnnnnnnnnnnnnnnnnnnnnnnnnnnnnnnnnnnnnnnnnnnnnnnnnnnnnnnnnnnnnnnnnnnnnnnnnnnnnnnnnnnnnnnnnnnnnnnnnnnnnnnnnnnnnnnnnnnnnnnnnnnnnnnnnnnnnnnnnnnnnnnnnnnnnnnnnnnnnnnnnnnnnnnnnnnnnnnnnnnnnnnnnnnnnnnnnnnnnnnnnnnnnnnnnnnnnnnnnnnnnnnnnnnnnnnnnnnnnnnnnnnnnnnnnnnnnnnnnnnnnnnnnnnnnnnnnnnnnnnnnnnnnnnnnnnnnnnnnnnnnnnnnnnnnnnnnnnnnnnnnnnnnnnnnnnnnnnnnnnnnnnnnnnnnnnnnnnnnnnnnnnnnnnnnnnnnnnnnnnnnnnnnnnnnnnnnnnnnnnnnnnnnnnnnnnnnnnnnnnnnnnnnnnnnnnnnnnnnnnnnnnnnnnnnnnnnnnnnnnnnnnnnnnnnnnnnnnnnnnnnnnnnnnnnnnnnnnnnnnnnnnnnnnnnnnnnnnnnnnnnnnnnnnnnnnnnnnnnnnnnnnnnnnnnnnnnnnnnnnnnnnnnnnnnnnnnnnnnnnnnnnnnnnnnnnnnnnnnnnnnnnnnnnnnnnnnnnnnnnnnnnnnnnnnnnnnnnnnnnnnnnnnnnnnnnnnnnnnnnnnnnnnnnnnnnnnnnnnnnnnnnnnnnnnnnnnnnnnnnnnnnnnnnnnnnnnnnnnnnnnnnnnnnnnnnnnnnnnnnnnnnnnnnnnnnnnnnnnnnnnnnnnnnnnnnnnnnnnnnnnnnnnnnnnnnnnnnnnnnnnnnnnnnnnnnnnnnnnnnnnnnnnnnnnnnnnnnnnnnnnnnnnnnnnnnnnnnnnnnnnnnnnnnnnnnnnnnnnnnnnnnnnnnnnnnnnnnnnnnnnnnnnnnnnnnnnnnnnnnnnnnnnnnnnnnnnnnnnnnnnnnnnnnnnnnnnnnnnnnnnnnnnnnnnnnnnnnnnnnnnnnnnnnnnnnnnnnnnnnnnnnnnnnnnnnnnnnnnnnnnnnnnnnnnnnnnnnnnnnnnnnnnnnnnnnnnnnnnnnnnnnnnnnnnnnnnnnnnnnnnnnnnnnnnnnnnnnnnnnnnnnnnnnnnnnnnnnnnnnnnnnnnnnnnnnnnnnnnnnnnnnnnnnnnnnnnnnnnnnnnnnnnnnnnnnnnnnnnnnnnnnnnnnnnnnnnnnnnnnnnnnnnnnnnnnnnnnnnnnnnnnnnnnnnnnnnnnnnnnnnnnnnnnnnnnnnnnnnnnnnnnnnnnnnnnnnnnnnnnnnnnnnnnnnnnnnnnnnnnnnnnnnnnnnnnnnnnnnnnnnnnnnnnnnnnnnnnnnnnnnnnnnnnnnnnnnnnnnnnnnnnnnnnnnnnnnnnnnnnnnnnnnnnnnnnnnnnnnnnnnnnnnnnnnnnnnnnnnnnnnnnnnnnnnnnnnnnnnnnnnnnnnnnnnnnnnnnnnnnnnnnnnnnnnnnnnnnnnnnnnnnnnnnnnnnnnnnnnnnnnnnnnnnnnnnnnnnnnnnnnnnnnnnnnnnnnnnnnnnnnnnnnnnnnnnnnnnnnnnnnnnnnnnnnnnnnnnnnnnnnnnnnnnnnnnnnnnnnnnnnnnnnnnnnnnnnnnnnnnnnnnnnnnnnnnnnnnnnnnnnnnnnnnnnnnnnnnnnnnnnnnnnnnnnnnnnnnnnnnnnnnnnnnnnnnnnnnnnnnnnnnnnnnnnnnnnnnnnnnnnnnnnnnnnnnnnnnnnnnnnnnnnnnnnnnnnnnnnnnnnnnnnnnnnnnnnnnnnnnnnnnnnnnnnnnnnnnnnnnnnnnnnnnnnnnnnnnnnnnnnnnnnnnnnnnnnnnnnnnnnnnnnnnnnnnnnnnnnnnnnnnnnnnnnnnnnnnnnnnnnnnnnnnnnnnnnnnnnnnnnnnnnnnnnnnnnnnnnnnnnnnnnnnnnnnnnnnnnnnnnnnnnnnnnnnnnnnnnnnnnnnnnnnnnnnnnnnnnnnnnnnnnnnnnnnnnnnnnnnnnnnnnnnnnnnnnnnnnnnnnnnnnnnnnnnnnnnnnnnnnnnnnnnnnnnnnnnnnnnnnnnnnnnnnnnnnnnnnnnnnnnnnnnnnnnnnnnnnnnnnnnnnnnnnnnnnnnnnnnnnnnnnnnnnnnnnnnnnnnnnnnnnnnnnnnnnnnnnnnnnnnnnnnnnnnnnnnnnnnnnnnnnnnnnnnnnnnnnnnnnnnnnnnnnnnnnnnnnnnnnnnnnnnnnnnnnnnnnnnnnnnnnnnnnnnnnnnnnnnnnnnnnnnnnnnnnnnnnnnnnnnnnnnnnnnnnnnnnnnnnnnnnnnnnnnnnnnnnnnnnnnnnnnnnnnnnnnnnnnnnnnnnnnnnnnnnnnnnnnnnnnnnnnnnnnnnnnnnnnnnnnnnnnnnnnnnnnnnnnnnnnnnnnnnnnnnnnnnnnnnnnnnnnnnnnnnnnnnnnnnnnnnnnnnnnnnnnnnnnnnnnnnnnnnnnnnnnnnnnnnnnnnnnnnnnnnnnnnnnnnnnnnnnnnnnnnnnnnnnnnnnnnnnnnnnnnnnnnnnnnnnnnnnnnnnnnnnnnnnnnnnnnnnnnnnnnnnnnnnnnnnnnnnnnnnnnnnnnnnnnnnnnnnnnnnnnnnnnnnnnnnnnnnnnnnnnnnnnnnnnnnnnnnnnnnnnnnnnnnnnnnnnnnnnnnnnnnnnnnnnnnnnnnnnnnnnnnnnnnnnnnnnnnnnnnnnnnnnnnnnnnnnnnnnnnnnnnnnnnnnnnnnnnnnnnnnnnnnnnnnnnnnnnnnnnnnnnnnnnnnnnnnnnnnnnnnnnnnnnnnnnnnnnnnnnnnnnnnnnnnnnnnnnnnnnnnnnnnnnnnnnnnnnnnnnnnnnnnnnnnnnnnnnnnnnnnnnnnnnnnnnnnnnnnnnnnnnnnnnnnnnnnnnnnnnnnnnnnnnnnnnnnnnnnnnnnnnnnnnnnnnnnnnnnnnnnnnnnnnnnnnnnnnnnnnnnnnnnnnnnnnnnnnnnnnnnnnnnnnnnnnnnnnnnnnnnnnnnnnnnnnnnnnnnnnnnnnnnnnnnnnnnnnnnnnnnnnnnnnnnnnnnnnnnnnnnnnnnnnnnnnnnnnnnnnnnnnnnnnnnnnnnnnnnnnnnnnnnnnnnnnnnnnnnnnnnnnnnnnnnnnnnnnnnnnnnnnnnnnnnnnnnnnnnnnnnnnnnnnnnnnnnnnnnnnnnnnnnnnnnnnnnnnnnnnnnnnnnnnnnnnnnnnnnnnnnnnnnnnnnnnnnnnnnnnnnnnnnnnnnnnnnnnnnnnnnnnnnnnnnnnnnnnnnnnnnnnnnnnnnnnnnnnnnnnnnnnnnnnnnnnnnnnnnnnnnnnnnnnnnnnnnnnnnnnnnnnnnnnnnnnnnnnnnnnnnnnnnnnnnnnnnnnnnnnnnnnnnnnnnnnnnnnnnnnnnnnnnnnnnnnnnnnnnnnnnnnnnnnnnnnnnnnnnnnnnnnnnnnnnnnnnnnnnnnnnnnnnnnnnnnnnnnnnnnnnnnnnnnnnnnnnnnnnnnnnnnnnnnnnnnnnnnnnnnnnnnnnnnnnnnnnnnnnnnnnnnnnnnnnnnnnnnnnnnnnnnnnnnnnnnnnnnnnnnnnnnnnnnnnnnnnnnnnnnnnnnnnnnnnnnnnnnnnnnnnnnnnnnnnnnnnnnnnnnnnnnnnnnnnnnnnnnnnnnnnnnnnnnnnnnnnnnnnnnnnnnnnnnnnnnnnnnnnnnnnnnnnnnnnnnnnnnnnnnnnnnnnnnnnnnnnnnnnnnnnnnnnnnnnnnnnnnnnnnnnnnnnnnnnnnnnnnnnnnnnnnnnnnnnnnnnnnnnnnnnnnnnnnnnnnnnnnnnnnnnnnnnnnnnnnnnnnnnnnnnnnnnnnnnnnnnnnnnnnnnnnnnnnnnnnnnnnnnnnnnnnnnnnnnnnnnnnnnnnnnnnnnnnnnnnnnnnnnnnnnnnnnnnnnnnnnnnnnnnnnnnnnnnnnnnnnnnnnnnnnnnnnnnnnnnnnnnnnnnnnnnnnnnnnnnnnnnnnnnnnnnnnnnnnnnnnnnnnnnnnnnnnnnnnnnnnnnnnnnnnnnnnnnnnnnnnnnnnnnnnnnnnnnnnnnnnnnnnnnnnnnnnnnnnnnnnnnnnnnnnnnnnnnnnnnnnnnnnnnnnnnnnnnnnnnnnnnnnnnnnnnnnnnnnnnnnnnnnnnnnnnnnnnnnnnnnnnnnnnnnnnnnnnnnnnnnnnnnnnnnnnnnnnnnnnnnnnnnnnnnnnnnnnnnnnnnnnnnnnnnnnnnnnnnnnnnnnnnnnnnnnnnnnnnnnnnnnnnnnnnnnnnnnnnnnnnnnnnnnnnnnnnnnnnnnnnnnnnnnnnnnnnnnnnnnnnnnnnnnnnnnnnnnnnnnnnnnnnnnnnnnnnnnnnnnnnnnnnnnnnnnnnnnnnnnnnnnnnnnnnnnnnnnnnnnnnnnnnnnnnnnnnnnnnnnnnnnnnnnnnnnnnnnnnnnnnnnnnnnnnnnnnnnnnnnnnnnnnnnnnnnnnnnnnnnnnnnnnnnnnnnnnnnnnnnnnnnnnnnnnnnnnnnnnnnnnnnnnnnnnnnnnnnnnnnnnnnnnnnnnnnnnnnnnnnnnnnnnnnnnnnnnnnnnnnnnnnnnnnnnnnnnnnnnnnnnnnnnnnnnnnnnnnnnnnnnnnnnnnnnnnnnnnnnnnnnnnnnnnnnnnnnnnnnnnnnnnnnnnnnnnnnnnnnnnnnnnnnnnnnnnnnnnnnnnnnnnnnnnnnnnnnnnnnnnnnnnnnnnnnnnnnnnnnnnnnnnnnnnnnnnnnnnnnnnnnnnnnnnnnnnnnnnnnnnnnnnnnnnnnnnnnnnnnnnnnnnnnnnnnnnnnnnnnnnnnnnnnnnnnnnnnnnnnnnnnnnnnnnnnnnnnnnnnnnnnnnnnnnnnnnnnnnnnnnnnnnnnnnnnnnnnnnnnnnnnnnnnnnnnnnnnnnnnnnnnnnnnnnnnnnnnnnnnnnnnnnnnnnnnnnnnnnnnnnnnnnnnnnnnnnnnnnnnnnnnnnnnnnnnnnnnnnnnnnnnnnnnnnnnnnnnnnnnnnnnnnnnnnnnnnnnnnnnnnnnnnnnnnnnnnnnnnnnnnnnnnnnnnnnnnnnnnnnnnnnnnnnnnnnnnnnnnnnnnnnnnnnnnnnnnnnnnnnnnnnnnnnnnnnnnnnnnnnnnnnnnnnnnnnnnnnnnnnnnnnnnnnnnnnnnnnnnnnnnnnnnnnnnnnnnnnnnnnnnnnnnnnnnnnnnnnnnnnnnnnnnnnnnnnnnnnnnnnnnnnnnnnnnnnnnnnnnnnnnnnnnnnnnnnnnnnnnnnnnnnnnnnnnnnnnnnnnnnnnnnnnnnnnnnnnnnnnnnnnnnnnnnnnnnnnnnnnnnnnnnnnnnnnnnnnnnnnnnnnnnnnnnnnnnnnnnnnnnnnnnnnnnnnnnnnnnnnnnnnnnnnnnnnnnnnnnnnnnnnnnnnnnnnnnnnnnnnnnnnnnnnnnnnnnnnnnnnnnnnnnnnnnnnnnnnnnnnnnnnnnnnnnnnnnnnnnnnnnnnnnnnnnnnnnnnnnnnnnnnnnnnnnnnnnnnnnnnnnnnnnnnnnnnnnnnnnnnnnnnnnnnnnnnnnnnnnnnnnnnnnnnnnnnnnnnnnnnnnnnnnnnnnnnnnnnnnnnnnnnnnnnnnnnnnnnnnnnnnnnnnnnnnnnnnnnnnnnnnnnnnnnnnnnnnnnnnnnnnnnnnnnnnnnnnnnnnnnnnnnnnnnnnnnnnnnnnnnnnnnnnnnnnnnnnnnnnnnnnnnnnnnnnnnnnnnnnnnnnnnnnnnnnnnnnnnnnnnnnnnnnnnnnnnnnnnnnnnnnnnnnnnnnnnnnnnnnnnnnnnnnnnnnnnnnnnnnnnnnnnnnnnnnnnnnnnnnnnnnnnnnnnnnnnnnnnnnnnnnnnnnnnnnnnnnnnnnnnnnnnnnnnnnnnnnnnnnnnnnnnnnnnnnnnnnnnnnnnnnnnnnnnnnnnnnnnnnnnnnnnnnnnnnnnnnnnnnnnnnnnnnnnnnnnnnnnnnnnnnnnnnnnnnnnnnnnnnnnnnnnnnnnnnnnnnnnnnnnnnnnnnnnnnnnnnnnnnnnnnnnnnnnnnnnnnnnnnnnnnnnnnnnnnnnnnnnnnnnnnnnnnnnnnnnnnnnnnnnnnnnnnnnnnnnnnnnnnnnnnnnnnnnnnnnnnnnnnnnnnnnnnnnnnnnnnnnnnnnnnnnnnnnnnnnnnnnnnnnnnnnnnnnnnnnnnnnnnnnnnnnnnnnnnnnnnnnnnnnnnnnnnnnnnnnnnnnnnnnnnnnnnnnnnnnnnnnnnnnnnnnnnnnnnnnnnnnnnnnnnnnnnnnnnnnnnnnnnnnnnnnnnnnnnnnnnnnnnnnnnnnnnnnnnnnnnnnnnnnnnnnnnnnnnnnnnnnnnnnnnnnnnnnnnnnnnnnnnnnnnnnnnnnnnnnnnnnnnnnnnnnnnnnnnnnnnnnnnnnnnnnnnnnnnnnnnnnnnnnnnnnnnnnnnnnnnnnnnnnnnnnnnnnnnnnnnnnnnnnnnnnnnnnnnnnnnnnnnnnnnnnnnnnnnnnnnnnnnnnnnnnnnnnnnnnnnnnnnnnnnnnnnnnnnnnnnnnnnnnnnnnnnnnnnnnnnnnnnnnnnnnnnnnnnnnnnnnnnnnnnnnnnnnnnnnnnnnnnnnnnnnnnnnnnnnnnnnnnnnnnnnnnnnnnnnnnnnnnnnnnnnnnnnnnnnnnnnnnnnnnnnnnnnnnnnnnnnnnnnnnnnnnnnnnnnnnnnnnnnnnnnnnnnnnnnnnnnnnnnnnnnnnnnnnnnnnnnnnnnnnnnnnnnnnnnnnnnnnnnnnnnnnnnnnnnnnnnnnnnnnnnnnnnnnnnnnnnnnnnnnnnnnnnnnnnnnnnnnnnnnnnnnnnnnnnnnnnnnnnnnnnnnnnnnnnnnnnnnnnnnnnnnnnnnnnnnnnnnnnnnnnnnnnnnnnnnnnnnnnnnnnnnnnnnnnnnnnnnnnnnnnnnnnnnnnnnnnnnnnnnnnnnnnnnnnnnnnnnnnnnnnnnnnnnnnnnnnnnnnnnnnnnnnnnnnnnnnnnnnnnnnnnnnnnnnnnnnnnnnnnnnnnnnnnnnnnnnnnnnnnnnnnnnnnnnnnnnnnnnnnnnnnnnnnnnnnnnnnnnnnnnnnnnnnnnnnnnnnnnnnnnnnnnnnnnnnnnnnnnnnnnnnnnnnnnnnnnnnnnnnnnnnnnnnnnnnnnnnnnnnnnnnnnnnnnnnnnnnnnnnnnnnnnnnnnnnnnnnnnnnnnnnnnnnnnnnnnnnnnnnnnnnnnnnnnnnnnnnnnnnnnnnnnnnnnnnnnnnnnnnnnnnnnnnnnnnnnnnnnnnnnnnnnnnnnnnnnnnnnnnnnnnnnnnnnnnnnnnnnnnnnnnnnnnnnnnnnnnnnnnnnnnnnnnnnnnnnnnnnnnnnnnnnnnnnnnnnnnnnnnnnnnnnnnnnnnnnnnnnnnnnnnnnnnnnnnnnnnnnnnnnnnnnnnnnnnnnnnnnnnnnnnnnnnnnnnnnnnnnnnnnnnnnnnnnnnnnnnnnnnnnnnnnnnnnnnnnnnnnnnnnnnnnnnnnnnnnnnnnnnnnnnnnnnnnnnnnnnnnnnnnnnnnnnnnnnnnnnnnnnnnnnnnnnnnnnnnnnnnnnnnnnnnnnnnnnnnnnnnnnnnnnnnnnnnnnnnnnnnnnnnnnnnnnnnnnnnnnnnnnnnnnnnnnnnnnnnnnnnnnnnnnnnnnnnnnnnnnnnnnnnnnnnnnnnnnnnnnnnnnnnnnnnnnnnnnnnnnnnnnnnnnnnnnnnnnnnnnnnnnnnnnnnnnnnnnnnnnnnnnnnnnnnnnnnnnnnnnnnnnnnnnnnnnnnnnnnnnnnnnnnnnnnnnnnnnnnnnnnnnnnnnnnnnnnnnnnnnnnnnnnnnnnnnnnnnnnnnnnnnnnnnnnnnnnnnnnnnnnnnnnnnnnnnnnnnnnnnnnnnnnnnnnnnnnnnnnnnnnnnnnnnnnnnnnnnnnnnnnnnnnnnnnnnnnnnnnnnnnnnnnnnnnnnnnnnnnnnnnnnnnnnnnnnnnnnnnnnnnnnnnnnnnnnnnnnnnnnnnnnnnnnnnnnnnnnnnnnnnnnnnnnnnnnnnnnnnnnnnnnnnnnnnnnnnnnnnnnnnnnnnnnnnnnnnnnnnnnnnnnnnnnnnnnnnnnnnnnnnnnnnnnnnnnnnnnnnnnnnnnnnnnnnnnnnnnnnnnnnnnnnnnnnnnnnnnnnnnnnnnnnnnnnnnnnnnnnnnnnnnnnnnnnnnnnnnnnnnnnnnnnnnnnnnnnnnnnnnnnnnnnnnnnnnnnnnnnnnnnnnnnnnnnnnnnnnnnnnnnnnnnnnnnnnnnnnnnnnnnnnnnnnnnnnnnnnnnnnnnnnnnnnnnnnnnnnnnnnnnnnnnnnnnnnnnnnnnnnnnnnnnnnnnnnnnnnnnnnnnnnnnnnnnnnnnnnnnnnnnnnnnnnnnnnnnnnnnnnnnnnnnnnnnnnnnnnnnnnnnnnnnnnnnnnnnnnnnnnnnnnnnnnnnnnnnnnnnnnnnnnnnnnnnnnnnnnnnnnnnnnnnnnnnnnnnnnnnnnnnnnnnnnnnnnnnnnnnnnnnnnnnnnnnnnnnnnnnnnnnnnnnnnnnnnnnnnnnnnnnnnnnnnnnnnnnnnnnnnnnnnnnnnnnnnnnnnnnnnnnnnnnnnnnnnnnnnnnnnnnnnnnnnnnnnnnnnnnnnnnnnnnnnnnnnnnnnnnnnnnnnnnnnnnnnnnnnnnnnnnnnnnnnnnnnnnnnnnnnnnnnnnnnnnnnnnnnnnnnnnnnnnnnnnnnnnnnnnnnnnnnnnnnnnnnnnnnnnnnnnnnnnnnnnnnnnnnnnnnnnnnnnnnnnnnnnnnnnnnnnnnnnnnnnnnnnnnnnnnnnnnnnnnnnnnnnnnnnnnnnnnnnnnnnnnnnnnnnnnnnnnnnnnnnnnnnnnnnnnnnnnnnnnnnnnnnnnnnnnnnnnnnnnnnnnnnnnnnnnnnnnnnnnnnnnnnnnnnnnnnnnnnnnnnnnnnnnnnnnnnnnnnnnnnnnnnnnnnnnnnnnnnnnnnnnnnnnnnnnnnnnnnnnnnnnnnnnnnnnnnnnnnnnnnnnnnnnnnnnnnnnnnnnnnnnnnnnnnnnnnnnnnnnnnnnnnnnnnnnnnnnnnnnnnnnnnnnnnnnnnnnnnnnnnnnnnnnnnnnnnnnnnnnnnnnnnnnnnnnnnnnnnnnnnnnnnnnnnnnnnnnnnnnnnnnnnnnnnnnnnnnnnnnnnnnnnnnnnnnnnnnnnnnnnnnnnnnnnnnnnnnnnnnnnnnnnnnnnnnnnnnnnnnnnnnnnnnnnnnnnnnnnnnnnnnnnnnnnnnnnnnnnnnnnnnnnnnnnnnnnnnnnnnnnnnnnnnnnnnnnnnnnnnnnnnnnnnnnnnnnnnnnnnnnnnnnnnnnnnnnnnnnnnnnnnnnnnnnnnnnnnnnnnnnnnnnnnnnnnnnnnnnnnnnnnnnnnnnnnnnnnnnnnnnnnnnnnnnnnnnnnnnnnnnnnnnnnnnnnnnnnnnnnnnnnnnnnnnnnnnnnnnnnnnnnnnnnnnnnnnnnnnnnnnnnnnnnnnnnnnnnnnnnnnnnnnnnnnnnnnnnnnnnnnnnnnnnnnnnnnnnnnnnnnnnnnnnnnnnnnnnnnnnnnnnnnnnnnnnnnnnnnnnnnnnnnnnnnnnnnnnnnnnnnnnnnnnnnnnnnnnnnnnnnnnnnnnnnnnnnnnnnnnnnnnnnnnnnnnnnnnnnnnnnnnnnnnnnnnnnnnnnnnnnnnnnnnnnnnnnnnnnnnnnnnnnnnnnnnnnnnnnnnnnnnnnnnnnnnnnnnnnnnnnnnnnnnnnnnnnnnnnnnnnnnnnnnnnnnnnnnnnnnnnnnnnnnnnnnnnnnnnnnnnnnnnnnnnnnnnnnnnnnnnnnnnnnnnnnnnnnnnnnnnnnnnnnnnnnnnnnnnnnnnnnnnnnnnnnnnnnnnnnnnnnnnnnnnnnnnnnnnnnnnnnnnnnnnnnnnnnnnnnnnnnnnnnnnnnnnnnnnnnnnnnnnnnnnnnnnnnnnnnnnnnnnnnnnnnnnnnnnnnnnnnnnnnnnnnnnnnnnnnnnnnnnnnnnnnnnnnnnnnnnnnnnnnnnnnnnnnnnnnnnnnnnnnnnnnnnnnnnnnnnnnnnnnnnnnnnnnnnnnnnnnnnnnnnnnnnnnnnnnnnnnnnnnnnnnnnnnnnnnnnnnnnnnnnnnnnnnnnnnnnnnnnnnnnnnnnnnnnnnnnnnnnnnnnnnnnnnnnnnnnnnnnnnnnnnnnnnnnnnnnnnnnnnnnnnnnnnnnnnnnnnnnnnnnnnnnnnnnnnnnnnnnnnnnnnnnnnnnnnnnnnnnnnnnnnnnnnnnnnnnnnnnnnnnnnnnnnnnnnnnnnnnnnnnnnnnnnnnnnnnnnnnnnnnnnnnnnnnnnnnnnnnnnnnnnnnnnnnnnnnnnnnnnnnnnnnnnnnnnnnnnnnnnnnnnnnnnnnnnnnnnnnnnnnnnnnnnnnnnnnnnnnnnnnnnnnnnnnnnnnnnnnnnnnnnnnnnnnnnnnnnnnnnnnnnnnnnnnnnnnnnnnnnnnnnnnnnnnnnnnnnnnnnnnnnnnnnnnnnnnnnnnnnnnnnnnnnnnnnnnnnnnnnnnnnnnnnnnnnnnnnnnnnnnnnnnnnnnnnnnnnnnnnnnnnnnnnnnnnnnnnnnnnnnnnnnnnnnnnnnnnnnnnnnnnnnnnnnnnnnnnnnnnnnnnnnnnnnnnnnnnnnnnnnnnnnnnnnnnnnnnnnnnnnnnnnnnnnnnnnnnnnnnnnnnnnnnnnnnnnnnnnnnnnnnnnnnnnnnnnnnnnnnnnnnnnnnnnnnnnnnnnnnnnnnnnnnnnnnnnnnnnnnnnnnnnnnnnnnnnnnnnnnnnnnnnnnnnnnnnnnnnnnnnnnnnnnnnnnnnnnnnnnnnnnnnnnnnnnnnnnnnnnnnnnnnnnnnnnnnnnnnnnnnnnnnnnnnnnnnnnnnnnnnnnnnnnnnnnnnnnnnnnnnnnnnnnnnnnnnnnnnnnnnnnnnnnnnnnnnnnnnnnnnnnnnnnnnnnnnnnnnnnnnnnnnnnnnnnnnnnnnnnnnnnnnnnnnnnnnnnnnnnnnnnnnnnnnnnnnnnnnnnnnnnnnnnnnnnnnnnnnnnnnnnnnnnnnnnnnnnnnnnnnnnnnnnnnnnnnnnnnnnnnnnnnnnnnnnnnnnnnnnnnnnnnnnnnnnnnnnnnnnnnnnnnnnnnnnnnnnnnnnnnnnnnnnnnnnnnnnnnnnnnnnnnnnnnnnnnnnnnnnnnnnnnnnnnnnnnnnnnnnnnnnnnnnnnnnnnnnnnnnnnnnnnnnnnnnnnnnnnnnnnnnnnnnnnnnnnnnnnnnnnnnnnnnnnnnnnnnnnnnnnnnnnnnnnnnnnnnnnnnnnnnnnnnnnnnnnnnnnnnnnnnnnnnnnnnnnnnnnnnnnnnnnnnnnnnnnnnnnnnnnnnnnnnnnnnnnnnnnnnnnnnnnnnnnnnnnnnnnnnnnnnnnnnnnnnnnnnnnnnnnnnnnnnnnnnnnnnnnnnnnnnnnnnnnnnnnnnnnnnnnnnnnnnnnnnnnnnnnnnnnnnnnnnnnnnnnnnnnnnnnnnnnnnnnnnnnnnnnnnnnnnnnnnnnnnnnnnnnnnnnnnnnnnnnnnnnnnnnnnnnnnnnnnnnnnnnnnnnnnnnnnnnnnnnnnnnnnnnnnnnnnnnnnnnnnnnnnnnnnnnnnnnnnnnnnnnnnnnnnnnnnnnnnnnnnnnnnnnnnnnnnnnnnnnnnnnnnnnnnnnnnnnnnnnnnnnnnnnnnnnnnnnnnnnnnnnnnnnnnnnnnnnnnnnnnnnnnnnnnnnnnnnnnnnnnnnnnnnnnnnnnnnnnnnnnnnnnnnnnnnnnnnnnnnnnnnnnnnnnnnnnnnnnnnnnnnnnnnnnnnnnnnnnnnnnnnnnnnnnnnnnnnnnnnnnnnnnnnnnnnnnnnnnnnnnnnnnnnnnnnnnnnnnnnnnnnnnnnnnnnnnnnnnnnnnnnnnnnnnnnnnnnnnnnnnnnnnnnnnnnnnnnnnnnnnnnnnnnnnnnnnnnnnnnnnnnnnnnnnnnnnnnnnnnnnnnnnnnnnnnnnnnnnnnnnnnnnnnnnnnnnnnnnnnnnnnnnnnnnnnnnnnnnnnnnnnnnnnnnnnnnnnnnnnnnnnnnnnnnnnnnnnnnnnnnnnnnnnnnnnnnnnnnnnnnnnnnnnnnnnnnnnnnnnnnnnnnnnnnnnnnnnnnnnnnnnnnnnnnnnnnnnnnnnnnnnnnnnnnnnnnnnnnnnnnnnnnnnnnnnnnnnnnnnnnnnnnnnnnnnnnnnnnnnnnnnnnnnnnnnnnnnnnnnnnnnnnnnnnnnnnnnnnnnnnnnnnnnnnnnnnnnnnnnnnnnnnnnnnnnnnnnnnnnnnnnnnnnnnnnnnnnnnnnnnnnnnnnnnnnnnnnnnnnnnnnnnnnnnnnnnnnnnnnnnnnnnnnnnnnnnnnnnnnnnnnnnnnnnnnnnnnnnnnnnnnnnnnnnnnnnnnnnnnnnnnnnnnnnnnnnnnnnnnnnnnnnnnnnnnnnnnnnnnnnnnnnnnnnnnnnnnnnnnnnnnnnnnnnnnnnnnnnnnnnnnnnnnnnnnnnnnnnnnnnnnnnnnnnnnnnnnnnnnnnnnnnnnnnnnnnnnnnnnnnnnnnnnnnnnnnnnnnnnnnnnnnnnnnnnnnnnnnnnnnnnnnnnnnnnnnnnnnnnnnnnnnnnnnnnnnnnnnnnnnnnnnnnnnnnnnnnnnnnnnnnnnnnnnnnnnnnnnnnnnnnnnnnnnnnnnnnnnnnnnnnnnnnnnnnnnnnnnnnnnnnnnnnnnnnnnnnnnnnnnnnnnnnnnnnnnnnnnnnnnnnnnnnnnnnnnnnnnnnnnnnnnnnnnnnnnnnnnnnnnnnnnnnnnnnnnnnnnnnnnnnnnnnnnnnnnnnnnnnnnnnnnnnnnnnnnnnnnnnnnnnnnnnnnnnnnnnnnnnnnnnnnnnnnnnnnnnnnnnnnnnnnnnnnnnnnnnnnnnnnnnnnnnnnnnnnnnnnnnnnnnnnnnnnnnnnnnnnnnnnnnnnnnnnnnnnnnnnnnnnnnnnnnnnnnnnnnnnnnnnnnnnnnnnnnnnnnnnnnnnnnnnnnnnnnnnnnnnnnnnnnnnnnnnnnnnnnnnnnnnnnnnnnnnnnnnnnnnnnnnnnnnnnnnnnnnnnnnnnnnnnnnnnnnnnnnnnnnnnnnnnnnnnnnnnnnnnnnnnnnnnnnnnnnnnnnnnnnnnnnnnnnnnnnnnnnnnnnnnnnnnnnnnnnnnnnnnnnnnnnnnnnnnnnnnnnnnnnnnnnnnnnnnnnnnnnnnnnnnnnnnnnnnnnnnnnnnnnnnnnnnnnnnnnnnnnnnnnnnnnnnnnnnnnnnnnnnnnnnnnnnnnnnnnnnnnnnnnnnnnnnnnnnnnnnnnnnnnnnnnnnnnnnnnnnnnnnnnnnnnnnnnnnnnnnnnnnnnnnnnnnnnnnnnnnnnnnnnnnnnnnnnnnnnnnnnnnnnnnnnnnnnnnnnnnnnnnnnnnnnnnnnnnnnnnnnnnnnnnnnnnnnnnnnnnnnnnnnnnnnnnnnnnnnnnnnnnnnnnnnnnnnnnnnnnnnnnnnnnnnnnnnnnnnnnnnnnnnnnnnnnnnnnnnnnnnnnnnnnnnnnnnnnnnnnnnnnnnnnnnnnnnnnnnnnnnnnnnnnnnnnnnnnnnnnnnnnnnnnnnnnnnnnnnnnnnnnnnnnnnnnnnnnnnnnnnnnnnnnnnnnnnnnnnnnnnnnnnnnnnnnnnnnnnnnnnnnnnnnnnnnnnnnnnnnnnnnnnnnnnnnnnnnnnnnnnnnnnnnnnnnnnnnnnnnnnnnnnnnnnnnnnnnnnnnnnnnnnnnnnnnnnnnnnnnnnnnnnnnnnnnnnnnnnnnnnnnnnnnnnnnnnnnnnnnnnnnnnnnnnnnnnnnnnnnnnnnnnnnnnnnnnnnnnnnnnnnnnnnnnnnnnnnnnnnnnnnnnnnnnnnnnnnnnnnnnnnnnnnnnnnnnnnnnnnnnnnnnnnnnnnnnnnnnnnnnnnnnnnnnnnnnnnnnnnnnnnnnnnnnnnnnnnnnnnnnnnnnnnnnnnnnnnnnnnnnnnnnnnnnnnnnnnnnnnnnnnnnnnnnnnnnnnnnnnnnnnnnnnnnnnnnnnnnnnnnnnnnnnnnnnnnnnnnnnnnnnnnnnnnnnnnnnnnnnnnnnnnnnnnnnnnnnnnnnnnnnnnnnnnnnnnnnnnnnnnnnnnnnnnnnnnnnnnnnnnnnnnnnnnnnnnnnnnnnnnnnnnnnnnnnnnnnnnnnnnnnnnnnnnnnnnnnnnnnnnnnnnnnnnnnnnnnnnnnnnnnnnnnnnnnnnnnnnnnnnnnnnnnnnnnnnnnnnnnnnnnnnnnnnnnnnnnnnnnnnnnnnnnnnnnnnnnnnnnnnnnnnnnnnnnnnnnnnnnnnnnnnnnnnnnnnnnnnnnnnnnnnnnnnnnnnnnnnnnnnnnnnnnnnnnnnnnnnnnnnnnnnnnnnnnnnnnnnnnnnnnnnnnnnnnnnnnnnnnnnnnnnnnnnnnnnnnnnnnnnnnnnnnnnnnnnnnnnnnnnnnnnnnnnnnnnnnnnnnnnnnnnnnnnnnnnnnnnnnnnnnnnnnnnnnnnnnnnnnnnnnnnnnnnnnnnnnnnnnnnnnnnnnnnnnnnnnnnnnnnnnnnnnnnnnnnnnnnnnnnnnnnnnnnnnnnnnnnnnnnnnnnnnnnnnnnnnnnnnnnnnnnnnnnnnnnnnnnnnnnnnnnnnnnnnnnnnnnnnnnnnnnnnnnnnnnnnnnnnnnnnnnnnnnnnnnnnnnnnnnnnnnnnnnnnnnnnnnnnnnnnnnnnnnnnnnnnnnnnnnnnnnnnnnnnnnnnnnnnnnnnnnnnnnnnnnnnnnnnnnnnnnnnnnnnnnnnnnnnnnnnnnnnnnnnnnnnnnnnnnnnnnnnnnnnnnnnnnnnnnnnnnnnnnnnnnnnnnnnnnnnnnnnnnnnnnnnnnnnnnnnnnnnnnnnnnnnnnnnnnnnnnnnnnnnnnnnnnnnnnnnnnnnnnnnnnnnnnnnnnnnnnnnnnnnnnnnnnnnnnnnnnnnnnnnnnnnnnnnnnnnnnnnnnnnnnnnnnnnnnnnnnnnnnnnnnnnnnnnnnnnnnnnnnnnnnnnnnnnnnnnnnnnnnnnnnnnnnnnnnnnnnnnnnnnnnnnnnnnnnnnnnnnnnnnnnnnnnnnnnnnnnnnnnnnnnnnnnnnnnnnnnnnnnnnnnnnnnnnnnnnnnnnnnnnnnnnnnnnnnnnnnnnnnnnnnnnnnnnnnnnnnnnnnnnnnnnnnnnnnnnnnnnnnnnnnnnnnnnnnnnnnnnnnnnnnnnnnnnnnnnnnnnnnnnnnnnnnnnnnnnnnnnnnnnnnnnnnnnnnnnnnnnnnnnnnnnnnnnnnnnnnnnnnnnnnnnnnnnnnnnnnnnnnnnnnnnnnnnnnnnnnnnnnnnnnnnnnnnnnnnnnnnnnnnnnnnnnnnnnnnnnnnnnnnnnnnnnnnnnnnnnnnnnnnnnnnnnnnnnnnnnnnnnnnnnnnnnnnnnnnnnnnnnnnnnnnnnnnnnnnnnnnnnnnnnnnnnnnnnnnnnnnnnnnnnnnnnnnnnnnnnnnnnnnnnnnnnnnnnnnnnnnnnnnnnnnnnnnnnnnnnnnnnnnnnnnnnnnnnnnnnnnnnnnnnnnnnnnnnnnnnnnnnnnnnnnnnnnnnnnnnnnnnnnnnnnnnnnnnnnnnnnnnnnnnnnnnnnnnnnnnnnnnnnnnnnnnnnnnnnnnnnnnnnnnnnnnnnnnnnnnnnnnnnnnnnnnnnnnnnnnnnnnnnnnnnnnnnnnnnnnnnnnnnnnnnnnnnnnnnnnnnnnnnnnnnnnnnnnnnnnnnnnnnnnnnnnnnnnnnnnnnnnnnnnnnnnnnnnnnnnnnnnnnnnnnnnnnnnnnnnnnnnnnnnnnnnnnnnnnnnnnnnnnnnnnnnnnnnnnnnnnnnnnnnnnnnnnnnnnnnnnnnnnnnnnnnnnnnnnnnnnnnnnnnnnnnnnnnnnnnnnnnnnnnnnnnnnnnnnnnnnnnnnnnnnnnnnnnnnnnnnnnnnnnnnnnnnnnnnnnnnnnnnnnnnnnnnnnnnnnnnnnnnnnnnnnnnnnnnnnnnnnnnnnnnnnnnnnnnnnnnnnnnnnnnnnnnnnnnnnnnnnnnnnnnnnnnnnnnnnnnnnnnnnnnnnnnnnnnnnnnnnnnnnnnnnnnnnnnnnnnnnnnnnnnnnnnnnnnnnnnnnnnnnnnnnnnnnnnnnnnnnnnnnnnnnnnnnnnnnnnnnnnnnnnnnnnnnnnnnnnnnnnnnnnnnnnnnnnnnnnnnnnnnnnnnnnnnnnnnnnnnnnnnnnnnnnnnnnnnnnnnnnnnnnnnnnnnnnnnnnnnnnnnnnnnnnnnnnnnnnnnnnnnnnnnnnnnnnnnnnnnnnnnnnnnnnnnnnnnnnnnnnnnnnnnnnnnnnnnnnnnnnnnnnnnnnnnnnnnnnnnnnnnnnnnnnnnnnnnnnnnnnnnnnnnnnnnnnnnnnnnnnnnnnnnnnnnnnnnnnnnnnnnnnnnnnnnnnnnnnnnnnnnnnnnnnnnnnnnnnnnnnnnnnnnnnnnnnnnnnnnnnnnnnnnnnnnnnnnnnnnnnnnnnnnnnnnnnnnnnnnnnnnnnnnnnnnnnnnnnnnnnnnnnnnnnnnnnnnnnnnnnnnnnnnnnnnnnnnnnnnnnnnnnnnnnnnnnnnnnnnnnnnnnnnnnnnnnnnnnnnnnnnnnnnnnnnnnnnnnnnnnnnnnnnnnnnnnnnnnnnnnnnnnnnnnnnnnnnnnnnnnnnnnnnnnnnnnnnnnnnnnnnnnnnnnnnnnnnnnnnnnnnnnnnnnnnnnnnnnnnnnnnnnnnnnnnnnnnnnnnnnnnnnnnnnnnnnnnnnnnnnnnnnnnnnnnnnnnnnnnnnnnnnnnnnnnnnnnnnnnnnnnnnnnnnnnnnnnnnnnnnnnnnnnnnnnnnnnnnnnnnnnnnnnnnnnnnnnnnnnnnnnnnnnnnnnnnnnnnnnnnnnnnnnnnnnnnnnnnnnnnnnnnnnnnnnnnnnnnnnnnnnnnnnnnnnnnnnnnnnnnnnnnnnnnnnnnnnnnnnnnnnnnnnnnnnnnnnnnnnnnnnnnnnnnnnnnnnnnnnnnnnnnnnnnnnnnnnnnnnnnnnnnnnnnnnnnnnnnnnnnnnnnnnnnnnnnnnnnnnnnnnnnnnnnnnnnnnnnnnnnnnnnnnnnnnnnnnnnnnnnnnnnnnnnnnnnnnnnnnnnnnnnnnnnnnnnnnnnnnnnnnnnnnnnnnnnnnnnnnnnnnnnnnnnnnnnnnnnnnnnnnnnnnnnnnnnnnnnnnnnnnnnnnnnnnnnnnnnnnnnnnnnnnnnnnnnnnnnnnnnnnnnnnnnnnnnnnnnnnnnnnnnnnnnnnnnnnnnnnnnnnnnnnnnnnnnnnnnnnnnnnnnnnnnnnnnnnnnnnnnnnnnnnnnnnnnnnnnnnnnnnnnnnnnnnnnnnnnnnnnnnnnnnnnnnnnnnnnnnnnnnnnnnnnnnnnnnnnnnnnnnnnnnnnnnnnnnnnnnnnnnnnnnnnnnnnnnnnnnnnnnnnnnnnnnnnnnnnnnnnnnnnnnnnnnnnnnnnnnnnnnnnnnnnnnnnnnnnnnnnnnnnnnnnnnnnnnnnnnnnnnnnnnnnnnnnnnnnnnnnnnnnnnnnnnnnnnnnnnnnnnnnnnnnnnnnnnnnnnnnnnnnnnnnnnnnnnnnnnnnnnnnnnnnnnnnnnnnnnnnnnnnnnnnnnnnnnnnnnnnnnnnnnnnnnnnnnnnnnnnnnnnnnnnnnnnnnnnnnnnnnnnnnnnnnnnnnnnnnnnnnnnnnnnnnnnnnnnnnnnnnnnnnnnnnnnnnnnnnnnnnnnnnnnnnnnnnnnnnnnnnnnnnnnnnnnnnnnnnnnnnnnnnnnnnnnnnnnnnnnnnnnnnnnnnnnnnnnnnnnnnnnnnnnnnnnnnnnnnnnnnnnnnnnnnnnnnnnnnnnnnnnnnnnnnnnnnnnnnnnnnnnnnnnnnnnnnnnnnnnnnnnnnnnnnnnnnnnnnnnnnnnnnnnnnnnnnnnnnnnnnnnnnnnnnnnnnnnnnnnnnnnnnnnnnnnnnnnnnnnnnnnnnnnnnnnnnnnnnnnnnnnnnnnnnnnnnnnnnnnnnnnnnnnnnnnnnnnnnnnnnnnnnnnnnnnnnnnnnnnnnnnnnnnnnnnnnnnnnnnnnnnnnnnnnnnnnnnnnnnnnnnnnnnnnnnnnnnnnnnnnnnnnnnnnnnnnnnnnnnnnnnnnnnnnnnnnnnnnnnnnnnnnnnnnnnnnnnnnnnnnnnnnnnnnnnnnnnnnnnnnnnnnnnnnnnnnnnnnnnnnnnnnnnnnnnnnnnnnnnnnnnnnnnnnnnnnnnnnnnnnnnnnnnnnnnnnnnnnnnnnnnnnnnnnnnnnnnnnnnnnnnnnnnnnnnnnnnnnnnnnnnnnnnnnnnnnnnnnnnnnnnnnnnnnnnnnnnnnnnnnnnnnnnnnnnnnnnnnnnnnnnnnnnnnnnnnnnnnnnnnnnnnnnnnnnnnnnnnnnnnnnnnnnnnnnnnnnnnnnnnnnnnnnnnnnnnnnnnnnnnnnnnnnnnnnnnnnnnnnnnnnnnnnnnnnnnnnnnnnnnnnnnnnnnnnnnnnnnnnnnnnnnnnnnnnnnnnnnnnnnnnnnnnnnnnnnnnnnnnnnnnnnnnnnnnnnnnnnnnnnnnnnnnnnnnnnnnnnnnnnnnnnnnnnnnnnnnnnnnnnnnnnnnnnnnnnnnnnnnnnnnnnnnnnnnnnnnnnnnnnnnnnnnnnnnnnnnnnnnnnnnnnnnnnnnnnnnnnnnnnnnnnnnnnnnnnnnnnnnnnnnnnnnnnnnnnnnnnnnnnnnnnnnnnnnnnnnnnnnnnnnnnnnnnnnnnnnnnnnnnnnnnnnnnnnnnnnnnnnnnnnnnnnnnnnnnnnnnnnnnnnnnnnnnnnnnnnnnnnnnnnnnnnnnnnnnnnnnnnnnnnnnnnnnnnnnnnnnnnnnnnnnnnnnnnnnnnnnnnnnnnnnnnnnnnnnnnnnnnnnnnnnnnnnnnnnnnnnnnnnnnnnnnnnnnnnnnnnnnnnnnnnnnnnnnnnnnnnnnnnnnnnnnnnnnnnnnnnnnnnnnnnnnnnnnnnnnnnnnnnnnnnnnnnnnnnnnnnnnnnnnnnnnnnnnnnnnnnnnnnnnnnnnnnnnnnnnnnnnnnnnnnnnnnnnnnnnnnnnnnnnnnnnnnnnnnnnnnnnnnnnnnnnnnnnnnnnnnnnnnnnnnnnnnnnnnnnnnnnnnnnnnnnnnnnnnnnnnnnnnnnnnnnnnnnnnnnnnnnnnnnnnnnnnnnnnnnnnnnnnnnnnnnnnnnnnnnnnnnnnnnnnnnnnnnnnnnnnnnnnnnnnnnnnnnnnnnnnnnnnnnnnnnnnnnnnnnnnnnnnnnnnnnnnnnnnnnnnnnnnnnnnnnnnnnnnnnnnnnnnnnnnnnnnnnnnnnnnnnnnnnnnnnnnnnnnnnnnnnnnnnnnnnnnnnnnnnnnnnnnnnnnnnnnnnnnnnnnnnnnnnnnnnnnnnnnnnnnnnnnnnnnnnnnnnnnnnnnnnnnnnnnnnnnnnnnnnnnnnnnnnnnnnnnnnnnnnnnnnnnnnnnnnnnnnnnnnnnnnnnnnnnnnnnnnnnnnnnnnnnnnnnnnnnnnnnnnnnnnnnnnnnnnnnnnnnnnnnnnnnnnnnnnnnnnnnnnnnnnnnnnnnnnnnnnnnnnnnnnnnnnnnnnnnnnnnnnnnnnnnnnnnnnnnnnnnnnnnnnnnnnnnnnnnnnnnnnnnnnnnnnnnnnnnnnnnnnnnnnnnnnnnnnnnnnnnnnnnnnnnnnnnnnnnnnnnnnnnnnnnnnnnnnnnnnnnnnnnnnnnnnnnnnnnnnnnnnnnnnnnnnnnnnnnnnnnnnnnnnnnnnnnnnnnnnnnnnnnnnnnnnnnnnnnnnnnnnnnnnnnnnnnnnnnnnnnnnnnnnnnnnnnnnnnnnnnnnnnnnnnnnnnnnnnnnnnnnnnnnnnnnnnnnnnnnnnnnnnnnnnnnnnnnnnnnnnnnnnnnnnnnnnnnnnnnnnnnnnnnnnnnnnnnnnnnnnnnnnnnnnnnnnnnnnnnnnnnnnnnnnnnnnnnnnnnnnnnnnnnnnnnnnnnnnnnnnnnnnnnnnnnnnnnnnnnnnnnnnnnnnnnnnnnnnnnnnnnnnnnnnnnnnnnnnnnnnnnnnnnnnnnnnnnnnnnnnnnnnnnnnnnnnnnnnnnnnnnnnnnnnnnnnnnnnnnnnnnnnnnnnnnnnnnnnnnnnnnnnnnnnnnnnnnnnnnnnnnnnnnnnnnnnnnnnnnnnnnnnnnnnnnnnnnnnnnnnnnnnnnnnnnnnnnnnnnnnnnnnnnnnnnnnnnnnnnnnnnnnnnnnnnnnnnnnnnnnnnnnnnnnnnnnnnnnnnnnnnnnnnnnnnnnnnnnnnnnnnnnnnnnnnnnnnnnnnnnnnnnnnnnnnnnnnnnnnnnnnnnnnnnnnnnnnnnnnnnnnnnnnnnnnnnnnnnnnnnnnnnnnnnnnnnnnnnnnnnnnnnnnnnnnnnnnnnnnnnnnnnnnnnnnnnnnnnnnnnnnnnnnnnnnnnnnnnnnnnnnnnnnnnnnnnnnnnnnnnnnnnnnnnnnnnnnnnnnnnnnnnnnnnnnnnnnnnnnnnnnnnnnnnnnnnnnnnnnnnnnnnnnnnnnnnnnnnnnnnnnnnnnnnnnnnnnnnnnnnnnnnnnnnnnnnnnnnnnnnnnnnnnnnnnnnnnnnnnnnnnnnnnnnnnnnnnnnnnnnnnnnnnnnnnnnnnnnnnnnnnnnnnnnnnnnnnnnnnnnnnnnnnnnnnnnnnnnnnnnnnnnnnnnnnnnnnnnnnnnnnnnnnnnnnnnnnnnnnnnnnnnnnnnnnnnnnnnnnnnnnnnnnnnnnnnnnnnnnnnnnnnnnnnnnnnnnnnnnnnnnnnnnnnnnnnnnnnnnnnnnnnnnnnnnnnnnnnnnnnnnnnnnnnnnnnnnnnnnnnnnnnnnnnnnnnnnnnnnnnnnnnnnnnnnnnnnnnnnnnnnnnnnnnnnnnnnnnnnnnnnnnnnnnnnnnnnnnnnnnnnnnnnnnnnnnnnnnnnnnnnnnnnnnnnnnnnnnnnnnnnnnnnnnnnnnnnnnnnnnnnnnnnnnnnnnnnnnnnnnnnnnnnnnnnnnnnnnnnnnnnnnnnnnnnnnnnnnnnnnnnnnnnnnnnnnnnnnnnnnnnnnnnnnnnnnnnnnnnnnnnnnnnnnnnnnnnnnnnnnnnnnnnnnnnnnnnnnnnnnnnnnnnnnnnnnnnnnnnnnnnnnnnnnnnnnnnnnnnnnnnnnnnnnnnnnnnnnnnnnnnnnnnnnnnnnnnnnnnnnnnnnnnnnnnnnnnnnnnnnnnnnnnnnnnnnnnnnnnnnnnnnnnnnnnnnnnnnnnnnnnnnnnnnnnnnnnnnnnnnnnnnnnnnnnnnnnnnnnnnnnnnnnnnnnnnnnnnnnnnnnnnnnnnnnnnnnnnnnnnnnnnnnnnnnnnnnnnnnnnnnnnnnnnnnnnnnnnnnnnnnnnnnnnnnnnnnnnnnnnnnnnnnnnnnnnnnnnnnnnnnnnnnnnnnnnnnnnnnnnnnnnnnnnnnnnnnnnnnnnnnnnnnnnnnnnnnnnnnnnnnnnnnnnnnnnnnnnnnnnnnnnnnnnnnnnnnnnnnnnnnnnnnnnnnnnnnnnnnnnnnnnnnnnnnnnnnnnnnnnnnnnnnnnnnnnnnnnnnnnnnnnnnnnnnnnnnnnnnnnnnnnnnnnnnnnnnnnnnnnnnnnnnnnnnnnnnnnnnnnnnnnnnnnnnnnnnnnnnnnnnnnnnnnnnnnnnnnnnnnnnnnnnnnnnnnnnnnnnnnnnnnnnnnnnnnnnnnnnnnnnnnnnnnnnnnnnnnnnnnnnnnnnnnnnnnnnnnnnnnnnnnnnnnnnnnnnnnnnnnnnnnnnnnnnnnnnnnnnnnnnnnnnnnnnnnnnnnnnnnnnnnnnnnnnnnnnnnnnnnnnnnnnnnnnnnnnnnnnnnnnnnnnnnnnnnnnnnnnnnnnnnnnnnnnnnnnnnnnnnnnnnnnnnnnnnnnnnnnnnnnnnnnnnnnnnnnnnnnnnnnnnnnnnnnnnnnnnnnnnnnnnnnnnnnnnnnnnnnnnnnnnnnnnnnnnnnnnnnnnnnnnnnnnnnnnnnnnnnnnnnnnnnnnnnnnnnnnnnnnnnnnnnnnnnnnnnnnnnnnnnnnnnnnnnnnnnnnnnnnnnnnnnnnnnnnnnnnnnnnnnnnnnnnnnnnnnnnnnnnnnnnnnnnnnnnnnnnnnnnnnnnnnnnnnnnnnnnnnnnnnnnnnnnnnnnnnnnnnnnnnnnnnnnnnnnnnnnnnnnnnnnnnnnnnnnnnnnnnnnnnnnnnnnnnnnnnnnnnnnnnnnnnnnnnnnnnnnnnnnnnnnnnnnnnnnnnnnnnnnnnnnnnnnnnnnnnnnnnnnnnnnnnnnnnnnnnnnnnnnnnnnnnnnnnnnnnnnnnnnnnnnnnnnnnnnnnnnnnnnnnnnnnnnnnnnnnnnnnnnnnnnnnnnnnnnnnnnnnnnnnnnnnnnnnnnnnnnnnnnnnnnnnnnnnnnnnnnnnnnnnnnnnnnnnnnnnnnnnnnnnnnnnnnnnnnnnnnnnnnnnnnnnnnnnnnnnnnnnnnnnnnnnnnnnnnnnnnnnnnnnnnnnnnnnnnnnnnnnnnnnnnnnnnnnnnnnnnnnnnnnnnnnnnnnnnnnnnnnnnnnnnnnnnnnnnnnnnnnnnnnnnnnnnnnnnnnnnnnnnnnnnnnnnnnnnnnnnnnnnnnnnnnnnnnnnnnnnnnnnnnnnnnnnnnnnnnnnnnnnnnnnnnnnnnnnnnnnnnnnnnnnnnnnnnnnnnnnnnnnnnnnnnnnnnnnnnnnnnnnnnnnnnnnnnnnnnnnnnnnnnnnnnnnnnnnnnnnnnnnnnnnnnnnnnnnnnnnnnnnnnnnnnnnnnnnnnnnnnnnnnnnnnnnnnnnnnnnnnnnnnnnnnnnnnnnnnnnnnnnnnnnnnnnnnnnnnnnnnnnnnnnnnnnnnnnnnnnnnnnnnnnnnnnnnnnnnnnnnnnnnnnnnnnnnnnnnnnnnnnnnnnnnnnnnnnnnnnnnnnnnnnnnnnnnnnnnnnnnnnnnnnnnnnnnnnnnnnnnnnnnnnnnnnnnnnnnnnnnnnnnnnnnnnnnnnnnnnnnnnnnnnnnnnnnnnnnnnnnnnnnnnnnnnnnnnnnnnnnnnnnnnnnnnnnnnnnnnnnnnnnnnnnnnnnnnnnnnnnnnnnnnnnnnnnnnnnnnnnnnnnnnnnnnnnnnnnnnnnnnnnnnnnnnnnnnnnnnnnnnnnnnnnnnnnnnnnnnnnnnnnnnnnnnnnnnnnnnnnnnnnnnnnnnnnnnnnnnnnnnnnnnnnnnnnnnnnnnnnnnnnnnnnnnnnnnnnnnnnnnnnnnnnnnnnnnnnnnnnnnnnnnnnnnnnnnnnnnnnnnnnnnnnnnnnnnnnnnnnnnnnnnnnnnnnnnnnnnnnnnnnnnnnnnnnnnnnnnnnnnnnnnnnnnnnnnnnnnnnnnnnnnnnnnnnnnnnnnnnnnnnnnnnnnnnnnnnnnnnnnnnnnnnnnnnnnnnnnnnnnnnnnnnnnnnnnnnnnnnnnnnnnnnnnnnnnnnnnnnnnnnnnnnnnnnnnnnnnnnnnnnnnnnnnnnnnnnnnnnnnnnnnnnnnnnnnnnnnnnnnnnnnnnnnnnnnnnnnnnnnnnnnnnnnnnnnnnnnnnnnnnnnnnnnnnnnnnnnnnnnnnnnnnnnnnnnnnnnnnnnnnnnnnnnnnnnnnnnnnnnnnnnnnnnnnnnnnnnnnnnnnnnnnnnnnnnnnnnnnnnnnnnnnnnnnnnnnnnnnnnnnnnnnnnnnnnnnnnnnnnnnnnnnnnnnnnnnnnnnnnnnnnnnnnnnnnnnnnnnnnnnnnnnnnnnnnnnnnnnnnnnnnnnnnnnnnnnnnnnnnnnnnnnnnnnnnnnnnnnnnnnnnnnnnnnnnnnnnnnnnnnnnnnnnnnnnnnnnnnnnnnnnnnnnnnnnnnnnnnnnnnnnnnnnnnnnnnnnnnnnnnnnnnnnnnnnnnnnnnnnnnnnnnnnnnnnnnnnnnnnnnnnnnnnnnnnnnnnnnnnnnnnnnnnnnnnnnnnnnnnnnnnnnnnnnnnnnnnnnnnnnnnnnnnnnnnnnnnnnnnnnnnnnnnnnnnnnnnnnnnnnnnnnnnnnnnnnnnnnnnnnnnnnnnnnnnnnnnnnnnnnnnnnnnnnnnnnnnnnnnnnnnnnnnnnnnnnnnnnnnnnnnnnnnnnnnnnnnnnnnnnnnnnnnnnnnnnnnnnnnnnnnnnnnnnnnnnnnnnnnnnnnnnnnnnnnnnnnnnnnnnnnnnnnnnnnnnnnnnnnnnnnnnnnnnnnnnnnnnnnnnnnnnnnnnnnnnnnnnnnnnnnnnnnnnnnnnnnnnnnnnnnnnnnnnnnnnnnnnnnnnnnnnnnnnnnnnnnnnnnnnnnnnnnnnnnnnnnnnnnnnnnnnnnnnnnnnnnnnnnnnnnnnnnnnnnnnnnnnnnnnnnnnnnnnnnnnnnnnnnnnnnnnnnnnnnnnnnnnnnnnnnnnnnnnnnnnnnnnnnnnnnnnnnnnnnnnnnnnnnnnnnnnnnnnnnnnnnnnnnnnnnnnnnnnnnnnnnnnnnnnnnnnnnnnnnnnnnnnnnnnnnnnnnnnnnnnnnnnnnnnnnnnnnnnnnnnnnnnnnnnnnnnnnnnnnnnnnnnnnnnnnnnnnnnnnnnnnnnnnnnnnnnnnnnnnnnnnnnnnnnnnnnnnnnnnnnnnnnnnnnnnnnnnnnnnnnnnnnnnnnnnnnnnnnnnnnnnnnnnnnnnnnnnnnnnnnnnnnnnnnnnnnnnnnnnnnnnnnnnnnnnnnnnnnnnnnnnnnnnnnnnnnnnnnnnnnnnnnnnnnnnnnnnnnnnnnnnnnnnnnnnnnnnnnnnnnnnnnnnnnnnnnnnnnnnnnnnnnnnnnnnnnnnnnnnnnnnnnnnnnnnnnnnnnnnnnnnnnnnnnnnnnnnnnnnnnnnnnnnnnnnnnnnnnnnnnnnnnnnnnnnnnnnnnnnnnnnnnnnnnnnnnnnnnnnnnnnnnnnnnnnnnnnnnnnnnnnnnnnnnnnnnnnnnnnnnnnnnnnnnnnnnnnnnnnnnnnnnnnnnnnnnnnnnnnnnnnnnnnnnnnnnnnnnnnnnnnnnnnnnnnnnnnnnnnnnnnnnnnnnnnnnnnnnnnnnnnnnnnnnnnnnnnnnnnnnnnnnnnnnnnnnnnnnnnnnnnnnnnnnnnnnnnnnnnnnnnnnnnnnnnnnnnnnnnnnnnnnnnnnnnnnnnnnnnnnnnnnnnnnnnnnnnnnnnnnnnnnnnnnnnnnnnnnnnnnnnnnnnnnnnnnnnnnnnnnnnnnnnnnnnnnnnnnnnnnnnnnnnnnnnnnnnnnnnnnnnnnnnnnnnnnnnnnnnnnnnnnnnnnnnnnnnnnnnnnnnnnnnnnnnnnnnnnnnnnnnnnnnnnnnnnnnnnnnnnnnnnnnnnnnnnnnnnnnnnnnnnnnnnnnnnnnnnnnnnnnnnnnnnnnnnnnnnnnnnnnnnnnnnnnnnnnnnnnnnnnnnnnnnnnnnnnnnnnnnnnnnnnnnnnnnnnnnnnnnnnnnnnnnnnnnnnnnnnnnnnnnnnnnnnnnnnnnnnnnnnnnnnnnnnnnnnnnnnnnnnnnnnnnnnnnnnnnnnnnnnnnnnnnnnnnnnnnnnnnnnnnnnnnnnnnnnnnnnnnnnnnnnnnnnnnnnnnnnnnnnnnnnnnnnnnnnnnnnnnnnnnnnnnnnnnnnnnnnnnnnnnnnnnnnnnnnnnnnnnnnnnnnnnnnnnnnnnnnnnnnnnnnnnnnnnnnnnnnnnnnnnnnnnnnnnnnnnnnnnnnnnnnnnnnnnnnnnnnnnnnnnnnnnnnnnnnnnnnnnnnnnnnnnnnnnnnnnnnnnnnnnnnnnnnnnnnnnnnnnnnnnnnnnnnnnnnnnnnnnnnnnnnnnnnnnnnnnnnnnnnnnnnnnnnnnnnnnnnnnnnnnnnnnnnnnnnnnnnnnnnnnnnnnnnnnnnnnnnnnnnnnnnnnnnnnnnnnnnnnnnnnnnnnnnnnnnnnnnnnnnnnnnnnnnnnnnnnnnnnnnnnnnnnnnnnnnnnnnnnnnnnnnnnnnnnnnnnnnnnnnnnnnnnnnnnnnnnnnnnnnnnnnnnnnnnnnnnnnnnnnnnnnnnnnnnnnnnnnnnnnnnnnnnnnnnnnnnnnnnnnnnnnnnnnnnnnnnnnnnnnnnnnnnnnnnnnnnnnnnnnnnnnnnnnnnnnnnnnnnnnnnnnnnnnnnnnnnnnnnnnnnnnnnnnnnnnnnnnnnnnnnnnnnnnnnnnnnnnnnnnnnnnnnnnnnnnnnnnnnnnnnnnnnnnnnnnnnnnnnnnnnnnnnnnnnnnnnnnnnnnnnnnnnnnnnnnnnnnnnnnnnnnnnnnnnnnnnnnnnnnnnnnnnnnnnnnnnnnnnnnnnnnnnnnnnnnnnnnnnnnnnnnnnnnnnnnnnnnnnnnnnnnnnnnnnnnnnnnnnnnnnnnnnnnnnnnnnnnnnnnnnnnnnnnnnnnnnnnnnnnnnnnnnnnnnnnnnnnnnnnnnnnnnnnnnnnnnnnnnnnnnnnnnnnnnnnnnnnnnnnnnnnnnnnnnnnnnnnnnnnnnnnnnnnnnnnnnnnnnnnnnnnnnnnnnnnnnnnnnnnnnnnnnnnnnnnnnnnnnnnnnnnnnnnnnnnnnnnnnnnnnnnnnnnnnnnnnnnnnnnnnnnnnnnnnnnnnnnnnnnnnnnnnnnnnnnnnnnnnnnnnnnnnnnnnnnnnnnnnnnnnnnnnnnnnnnnnnnnnnnnnnnnnnnnnnnnnnnnnnnnnnnnnnnnnnnnnnnnnnnnnnnnnnnnnnnnnnnnnnnnnnnnnnnnnnnnnnnnnnnnnnnnnnnnnnnnnnnnnnnnnnnnnnnnnnnnnnnnnnnnnnnnnnnnnnnnnnnnnnnnnnnnnnnnnnnnnnnnnnnnnnnnnnnnnnnnnnnnnnnnnnnnnnnnnnnnnnnnnnnnnnnnnnnnnnnnnnnnnnnnnnnnnnnnnnnnnnnnnnnnnnnnnnnnnnnnnnnnnnnnnnnnnnnnnnnnnnnnnnnnnnnnnnnnnnnnnnnnnnnnnnnnnnnnnnnnnnnnnnnnnnnnnnnnnnnnnnnnnnnnnnnnnnnnnnnnnnnnnnnnnnnnnnnnnnnnnnnnnnnnnnnnnnnnnnnnnnnnnnnnnnnnnnnnnnnnnnnnnnnnnnnnnnnnnnnnnnnnnnnnnnnnnnnnnnnnnnnnnnnnnnnnnnnnnnnnnnnnnnnnnnnnnnnnnnnnnnnnnnnnnnnnnnnnnnnnnnnnnnnnnnnnnnnnnnnnnnnnnnnnnnnnnnnnnnnnnnnnnnnnnnnnnnnnnnnnnnnnnnnnnnnnnnnnnnnnnnnnnnnnnnnnnnnnnnnnnnnnnnnnnnnnnnnnnnnnnnnnnnnnnnnnnnnnnnnnnnnnnnnnnnnnnnnnnnnnnnnnnnnnnnnnnnnnnnnnnnnnnnnnnnnnnnnnnnnnnnnnnnnnnnnnnnnnnnnnnnnnnnnnnnnnnnnnnnnnnnnnnnnnnnnnnnnnnnnnnnnnnnnnnnnnnnnnnnnnnnnnnnnnnnnnnnnnnnnnnnnnnnnnnnnnnnnnnnnnnnnnnnnnnnnnnnnnnnnnnnnnnnnnnnnnnnnnnnnnnnnnnnnnnnnnnnnnnnnnnnnnnnnnnnnnnnnnnnnnnnnnnnnnnnnnnnnnnnnnnnnnnnnnnnnnnnnnnnnnnnnnnnnnnnnnnnnnnnnnnnnnnnnnnnnnnnnnnnnnnnnnnnnnnnnnnnnnnnnnnnnnnnnnnnnnnnnnnnnnnnnnnnnnnnnnnnnnnnnnnnnnnnnnnnnnnnnnnnnnnnnnnnnnnnnnnnnnnnnnnnnnnnnnnnnnnnnnnnnnnnnnnnnnnnnnnnnnnnnnnnnnnnnnnnnnnnnnnnnnnnnnnnnnnnnnnnnnnnnnnnnnnnnnnnnnnnnnnnnnnnnnnnnnnnnnnnnnnnnnnnnnnnnnnnnnnnnnnnnnnnnnnnnnnnnnnnnnnnnnnnnnnnnnnnnnnnnnnnnnnnnnnnnnnnnnnnnnnnnnnnnnnnnnnnnnnnnnnnnnnnnnnnnnnnnnnnnnnnnnnnnnnnnnnnnnnnnnnnnnnnnnnnnnnnnnnnnnnnnnnnnnnnnnnnnnnnnnnnnnnnnnnnnnnnnnnnnnnnnnnnnnnnnnnnnnnnnnnnnnnnnnnnnnnnnnnnnnnnnnnnnnnnnnnnnnnnnnnnnnnnnnnnnnnnnnnnnnnnnnnnnnnnnnnnnnnnnnnnnnnnnnnnnnnnnnnnnnnnnnnnnnnnnnnnnnnnnnnnnnnnnnnnnnnnnnnnnnnnnnnnnnnnnnnnnnnnnnnnnnnnnnnnnnnnnnnnnnnnnnnnnnnnnnnnnnnnnnnnnnnnnnnnnnnnnnnnnnnnnnnnnnnnnnnnnnnnnnnnnnnnnnnnnnnnnnnnnnnnnnnnnnnnnnnnnnnnnnnnnnnnnnnnnnnnnnnnnnnnnnnnnnnnnnnnnnnnnnnnnnnnnnnnnnnnnnnnnnnnnnnnnnnnnnnnnnnnnnnnnnnnnnnnnnnnnnnnnnnnnnnnnnnnnnnnnnnnnnnnnnnnnnnnnnnnnnnnnnnnnnnnnnnnnnnnnnnnnnnnnnnnnnnnnnnnnnnnnnnnnnnnnnnnnnnnnnnnnnnnnnnnnnnnnnnnnnnnnnnnnnnnnnnnnnnnnnnnnnnnnnnnnnnnnnnnnnnnnnnnnnnnnnnnnnnnnnnnnnnnnnnnnnnnnnnnnnnnnnnnnnnnnnnnnnnnnnnnnnnnnnnnnnnnnnnnnnnnnnnnnnnnnnnnnnnnnnnnnnnnnnnnnnnnnnnnnnnnnnnnnnnnnnnnnnnnnnnnnnnnnnnnnnnnnnnnnnnnnnnnnnnnnnnnnnnnnnnnnnnnnnnnnnnnnnnnnnnnnnnnnnnnnnnnnnnnnnnnnnnnnnnnnnnnnnnnnnnnnnnnnnnnnnnnnnnnnnnnnnnnnnnnnnnnnnnnnnnnnnnnnnnnnnnnnnnnnnnnnnnnnnnnnnnnnnnnnnnnnnnnnnnnnnnnnnnnnnnnnnnnnnnnnnnnnnnnnnnnnnnnnnnnnnnnnnnnnnnnnnnnnnnnnnnnnnnnnnnnnnnnnnnnnnnnnnnnnnnnnnnnnnnnnnnnnnnnnnnnnnnnnnnnnnnnnnnnnnnnnnnnnnnnnnnnnnnnnnnnnnnnnnnnnnnnnnnnnnnnnnnnnnnnnnnnnnnnnnnnnnnnnnnnnnnnnnnnnnnnnnnnnnnnnnnnnnnnnnnnnnnnnnnnnnnnnnnnnnnnnnnnnnnnnnnnnnnnnnnnnnnnnnnnnnnnnnnnnnnnnnnnnnnnnnnnnnnnnnnnnnnnnnnnnnnnnnnnnnnnnnnnnnnnnnnnnnnnnnnnnnnnnnnnnnnnnnnnnnnnnnnnnnnnnnnnnnnnnnnnnnnnnnnnnnnnnnnnnnnnnnnnnnnnnnnnnnnnnnnnnnnnnnnnnnnnnnnnnnnnnnnnnnnnnnnnnnnnnnnnnnnnnnnnnnnnnnnnnnnnnnnnnnnnnnnnnnnnnnnnnnnnnnnnnnnnnnnnnnnnnnnnnnnnnnnnnnnnnnnnnnnnnnnnnnnnnnnnnnnnnnnnnnnnnnnnnnnnnnnnnnnnnnnnnnnnnnnnnnnnnnnnnnnnnnnnnnnnnnnnnnnnnnnnnnnnnnnnnnnnnnnnnnnnnnnnnnnnnnnnnnnnnnnnnnnnnnnnnnnnnnnnnnnnnnnnnnnnnnnnnnnnnnnnnnnnnnnnnnnnnnnnnnnnnnnnnnnnnnnnnnnnnnnnnnnnnnnnnnnnnnnnnnnnnnnnnnnnnnnnnnnnnnnnnnnnnnnnnnnnnnnnnnnnnnnnnnnnnnnnnnnnnnnnnnnnnnnnnnnnnnnnnnnnnnnnnnnnnnnnnnnnnnnnnnnnnnnnnnnnnnnnnnnnnnnnnnnnnnnnnnnnnnnnnnnnnnnnnnnnnnnnnnnnnnnnnnnnnnnnnnnnnnnnnnnnnnnnnnnnnnnnnnnnnnnnnnnnnnnnnnnnnnnnnnnnnnnnnnnnnnnnnnnnnnnnnnnnnnnnnnnnnnnnnnnnnnnnnnnnnnnnnnnnnnnnnnnnnnnnnnnnnnnnnnnnnnnnnnnnnnnnnnnnnnnnnnnnnnnnnnnnnnnnnnnnnnnnnnnnnnnnnnnnnnnnnnnnnnnnnnnnnnnnnnnnnnnnnnnnnnnnnnnnnnnnnnnnnnnnnnnnnnnnnnnnnnnnnnnnnnnnnnnnnnnnnnnnnnnnnnnnnnnnnnnnnnnnnnnnnnnnnnnnnnnnnnnnnnnnnnnnnnnnnnnnnnnnnnnnnnnnnnnnnnnnnnnnnnnnnnnnnnnnnnnnnnnnnnnnnnnnnnnnnnnnnnnnnnnnnnnnnnnnnnnnnnnnnnnnnnnnnnnnnnnnnnnnnnnnnnnnnnnnnnnnnnnnnnnnnnnnnnnnnnnnnnnnnnnnnnnnnnnnnnnnnnnnnnnnnnnnnnnnnnnnnnnnnnnnnnnnnnnnnnnnnnnnnnnnnnnnnnnnnnnnnnnnnnnnnnnnnnnnnnnnnnnnnnnnnnnnnnnnnnnnnnnnnnnnnnnnnnnnnnnnnnnnnnnnnnnnnnnnnnnnnnnnnnnnnnnnnnnnnnnnnnnnnnnnnnnnnnnnnnnnnnnnnnnnnnnnnnnnnnnnnnnnnnnnnnnnnnnnnnnnnnnnnnnnnnnnnnnnnnnnnnnnnnnnnnnnnnnnnnnnnnnnnnnnnnnnnnnnnnnnnnnnnnnnnnnnnnnnnnnnnnnnnnnnnnnnnnnnnnnnnnnnnnnnnnnnnnnnnnnnnnnnnnnnnnnnnnnnnnnnnnnnnnnnnnnnnnnnnnnnnnnnnnnnnnnnnnnnnnnnnnnnnnnnnnnnnnnnnnnnnnnnnnnnnnnnnnnnnnnnnnnnnnnnnnnnnnnnnnnnnnnnnnnnnnnnnnnnnnnnnnnnnnnnnnnnnnnnnnnnnnnnnnnnnnnnnnnnnnnnnnnnnnnnnnnnnnnnnnnnnnnnnnnnnnnnnnnnnnnnnnnnnnnnnnnnnnnnnnnnnnnnnnnnnnnnnnnnnnnnnnnnnnnnnnnnnnnnnnnnnnnnnnnnnnnnnnnnnnnnnnnnnnnnnnnnnnnnnnnnnnnnnnnnnnnnnnnnnnnnnnnnnnnnnnnnnnnnnnnnnnnnnnnnnnnnnnnnnnnnnnnnnnnnnnnnnnnnnnnnnnnnnnnnnnnnnnnnnnnnnnnnnnnnnnnnnnnnnnnnnnnnnnnnnnnnnnnnnnnnnnnnnnnnnnnnnnnnnnnnnnnnnnnnnnnnnnnnnnnnnnnnnnnnnnnnnnnnnnnnnnnnnnnnnnnnnnnnnnnnnnnnnnnnnnnnnnnnnnnnnnnnnnnnnnnnnnnnnnnnnnnnnnnnnnnnnnnnnnnnnnnnnnnnnnnnnnnnnnnnnnnnnnnnnnnnnnnnnnnnnnnnnnnnnnnnnnnnnnnnnnnnnnnnnnnnnnnnnnnnnnnnnnnnnnnnnnnnnnnnnnnnnnnnnnnnnnnnnnnnnnnnnnnnnnnnnnnnnnnnnnnnnnnnnnnnnnnnnnnnnnnnnnnnnnnnnnnnnnnnnnnnnnnnnnnnnnnnnnnnnnnnnnnnnnnnnnnnnnnnnnnnnnnnnnnnnnnnnnnnnnnnnnnnnnnnnnnnnnnnnnnnnnnnnnnnnnnnnnnnnnnnnnnnnnnnnnnnnnnnnnnnnnnnnnnnnnnnnnnnnnnnnnnnnnnnnnnnnnnnnnnnnnnnnnnnnnnnnnnnnnnnnnnnnnnnnnnnnnnnnnnnnnnnnnnnnnnnnnnnnnnnnnnnnnnnnnnnnnnnnnnnnnnnnnnnnnnnnnnnnnnnnnnnnnnnnnnnnnnnnnnnnnnnnnnnnnnnnnnnnnnnnnnnnnnnnnnnnnnnnnnnnnnnnnnnnnnnnnnnnnnnnnnnnnnnnnnnnnnnnnnnnnnnnnnnnnnnnnnnnnnnnnnnnnnnnnnnnnnnnnnnnnnnnnnnnnnnnnnnnnnnnnnnnnnnnnnnnnnnnnnnnnnnnnnnnnnnnnnnnnnnnnnnnnnnnnnnnnnnnnnnnnnnnnnnnnnnnnnnnnnnnnnnnnnnnnnnnnnnnnnnnnnnnnnnnnnnnnnnnnnnnnnnnnnnnnnnnnnnnnnnnnnnnnnnnnnnnnnnnnnnnnnnnnnnnnnnnnnnnnnnnnnnnnnnnnnnnnnnnnnnnnnnnnnnnnnnnnnnnnnnnnnnnnnnnnnnnnnnnnnnnnnnnnnnnnnnnnnnnnnnnnnnnnnnnnnnnnnnnnnnnnnnnnnnnnnnnnnnnnnnnnnnnnnnnnnnnnnnnnnnnnnnnnnnnnnnnnnnnnnnnnnnnnnnnnnnnnnnnnnnnnnnnnnnnnnnnnnnnnnnnnnnnnnnnnnnnnnnnnnnnnnnnnnnnnnnnnnnnnnnnnnnnnnnnnnnnnnnnnnnnnnnnnnnnnnnnnnnnnnnnnnnnnnnnnnnnnnnnnnnnnnnnnnnnnnnnnnnnnnnnnnnnnnnnnnnnnnnnnnnnnnnnnnnnnnnnnnnnnnnnnnnnnnnnnnnnnnnnnnnnnnnnnnnnnnnnnnnnnnnnnnnnnnnnnnnnnnnnnnnnnnnnnnnnnnnnnnnnnnnnnnnnnnnnnnnnnnnnnnnnnnnnnnnnnnnnnnnnnnnnnnnnnnnnnnnnnnnnnnnnnnnnnnnnnnnnnnnnnnnnnnnnnnnnnnnnnnnnnnnnnnnnnnnnnnnnnnnnnnnnnnnnnnnnnnnnnnnnnnnnnnnnnnnnnnnnnnnnnnnnnnnnnnnnnnnnnnnnnnnnnnnnnnnnnnnnnnnnnnnnnnnnnnnnnnnnnnnnnnnnnnnnnnnnnnnnnnnnnnnnnnnnnnnnnnnnnnnnnnnnnnnnnnnnnnnnnnnnnnnnnnnnnnnnnnnnnnnnnnnnnnnnnnnnnnnnnnnnnnnnnnnnnnnnnnnnnnnnnnnnnnnnnnnnnnnnnnnnnnnnnnnnnnnnnnnnnnnnnnnnnnnnnnnnnnnnnnnnnnnnnnnnnnnnnnnnnnnnnnnnnnnnnnnnnnnnnnnnnnnnnnnnnnnnnnnnnnnnnnnnnnnnnnnnnnnnnnnnnnnnnnnnnnnnnnnnnnnnnnnnnnnnnnnnnnnnnnnnnnnnnnnnnnnnnnnnnnnnnnnnnnnnnnnnnnnnnnnnnnnnnnnnnnnnnnnnnnnnnnnnnnnnnnnnnnnnnnnnnnnnnnnnnnnnnnnnnnnnnnnnnnnnnnnnnnnnnnnnnnnnnnnnnnnnnnnnnnnnnnnnnnnnnnnnnnnnnnnnnnnnnnnnnnnnnnnnnnnnnnnnnnnnnnnnnnnnnnnnnnnnnnnnnnnnnnnnnnnnnnnnnnnnnnnnnnnnnnnnnnnnnnnnnnnnnnnnnnnnnnnnnnnnnnnnnnnnnnnnnnnnnnnnnnnnnnnnnnnnnnnnnnnnnnnnnnnnnnnnnnnnnnnnnnnnnnnnnnnnnnnnnnnnnnnnnnnnnnnnnnnnnnnnnnnnnnnnnnnnnnnnnnnnnnnnnnnnnnnnnnnnnnnnnnnnnnnnnnnnnnnnnnnnnnnnnnnnnnnnnnnnnnnnnnnnnnnnnnnnnnnnnnnnnnnnnnnnnnnnnnnnnnnnnnnnnnnnnnnnnnnnnnnnnnnnnnnnnnnnnnnnnnnnnnnnnnnnnnnnnnnnnnnnnnnnnnnnnnnnnnnnnnnnnnnnnnnnnnnnnnnnnnnnnnnnnnnnnnnnnnnnnnnnnnnnnnnnnnnnnnnnnnnnnnnnnnnnnnnnnnnnnnnnnnnnnnnnnnnnnnnnnnnnnnnnnnnnnnnnnnnnnnnnnnnnnnnnnnnnnnnnnnnnnnnnnnnnnnnnnnnnnnnnnnnnnnnnnnnnnnnnnnnnnnnnnnnnnnnnnnnnnnnnnnnnnnnnnnnnnnnnnnnnnnnnnnnnnnnnnnnnnnnnnnnnnnnnnnnnnnnnnnnnnnnnnnnnnnnnnnnnnnnnnnnnnnnnnnnnnnnnnnnnnnnnnnnnnnnnnnnnnnnnnnnnnnnnnnnnnnnnnnnnnnnnnnnnnnnnnnnnnnnnnnnnnnnnnnnnnnnnnnnnnnnnnnnnnnnnnnnnnnnnnnnnnnnnnnnnnnnnnnnnnnnnnnnnnnnnnnnnnnnnnnnnnnnnnnnnnnnnnnnnnnnnnnnnnnnnnnnnnnnnnnnnnnnnnnnnnnnnnnnnnnnnnnnnnnnnnnnnnnnnnnnnnnnnnnnnnnnnnnnnnnnnnnnnnnnnnnnnnnnnnnnnnnnnnnnnnnnnnnnnnnnnnnnnnnnnnnnnnnnnnnnnnnnnnnnnnnnnnnnnnnnnnnnnnnnnnnnnnnnnnnnnnnnnnnnnnnnnnnnnnnnnnnnnnnnnnnnnnnnnnnnnnnnnnnnnnnnnnnnnnnnnnnnnnnnnnnnnnnnnnnnnnnnnnnnnnnnnnnnnnnnnnnnnnnnnnnnnnnnnnnnnnnnnnnnnnnnnnnnnnnnnnnnnnnnnnnnnnnnnnnnnnnnnnnnnnnnnnnnnnnnnnnnnnnnnnnnnnnnnnnnnnnnnnnnnnnnnnnnnnnnnnnnnnnnnnnnnnnnnnnnnnnnnnnnnnnnnnnnnnnnnnnnnnnnnnnnnnnnnnnnnnnnnnnnnnnnnnnnnnnnnnnnnnnnnnnnnnnnnnnnnnnnnnnnnnnnnnnnnnnnnnnnnnnnnnnnnnnnnnnnnnnnnnnnnnnnnnnnnnnnnnnnnnnnnnnnnnnnnnnnnnnnnnnnnnnnnnnnnnnnnnnnnnnnnnnnnnnnnnnnnnnnnnnnnnnnnnnnnnnnnnnnnnnnnnnnnnnnnnnnnnnnnnnnnnnnnnnnnnnnaataaagtatccaaacatacgtccttgcgtggcatccgagggcctcctgccttttctaaacctttagaaacaaccatagaaaagcgtaggcaggccctccatccaagacaaggccccaaaaaagtggggatgagtcagtatcatttctgcttgacgtccaatgagattagtgatatagtgttaaaccaagtacgggtggaaccgagctccgaccggtcggcgaccggccatctccctccgaagcccaattggatcgtggtgcgttttgaagaggcgtcatcatgaggatgcaaagcgatgggaaacgcaattcctgaagctggacaatattcaaatcctgaagcggctggcaaaagttttttcaaccggtatgaccatacctgtcatacccctgtgcgatactgaaaatagattgatggaggacggctatgaactataatctctgcgatgagaattggattccagtactctaccgaaacggccaattcaaggaagtcgggattttgcaggcattgcaggaggcggggcagatttcgcagattgccgcgtccaatccgatggatcgggttgccttgctccgtttcctgctggcgattgtctactggtgtcaaggcaatccaccggcagaagatgagaaggagcggattctggccgacggccaattcccgaaaaactggtttgggaagctggaacaaaagaaggagttgtttaacctgttaggagacgggcagagattccttcaagatatttccgcccaaagaaaacgtcccattaccgatctcatccacgaggttcctgctggaaataacttctggcacttcaatcacgccattgattaccaccacggactttgcccggcatgttgtgcacgaggattgcttcgcctacccttgttccacgtcagtgggttgccggatttgaagtcgggaatcaacggcgtaccgcccatctacgttatgccgcttgggaagactctcttggagaccctgcgtctcaactggcgacagcacggcggcgacttaggcgtccccgcatgggaggattgccgcatgacgccgccgacggatgctcccgttccattgttgacgggactgacggttctctcccgacgagtgtacctccatgatccctcggagtcggacgagtgttgcatcggttgtggaaagcgggttggagagttgattctatcctgcgaatttcaatcggcgggttcgctggagaaccggcattggaaagatcctcacgtcgtttattcctcttcggacaaggcggtgaaggctcctaacttggaggacgagcttatagccgatagaccgtggtgccagttgttctccgaagtgtcgttccccgacgagagccgaggcctgacgctgtttattacggggttttccacgagcaaagccaagtacgtggacgtctgggagcgaacatgtaagattggggcaaccaaccccgattccgtgcgacagtggaaggaaaccgtcgacaatctccggcggcttaagccgaaagactgggatgcaatggagccgaagggccgcaagtacaccgggattcgggccggtgtcaccgcaatgaccccgcatgtcgagactcaggtctcccgccgaattcccgaactgacggcgaatgatggcgagacagactttcaagaggggctgcaggagtaccgtaaggcgattggcattctggcctcctctctatatccgaacgccacttcggagcatctggatcggcaacgacaactccaggaggccgtaagattggctaggccgcgaaagtcgcttgccaagaaagaaaggaaggaacgatgaccgcgacgcatgattttctggagaacatccgatcactgaagaccggggaccgaggaagattaagggcactggctaacaagccgctggatcgctcgctgaacggctttgatctcttcgccggactgtggtggcccctgcgtcagaaaagccaatttgccccacgacgggaagtcgcatggctggtggccaagcttttcagcttttgtccactggatcaggagaatggcgcaaccgtggcgcgtcaactcggtcgactatcggataacgcccggcttcgacagcaatttgacgatctgctcgggctgcccctgtcgcagctcgaagttcctttgcaacagtttctccgcatgctggcccgccggtcactgtcggtggattggatccgcctcaccgatgacctttcacaatgggaaaaccgggagacccgcctccagtgggcgaaggagtttctcgaacggaattcacagtgttaactttttgtaggagacatcgtatgttgatcgacattcacatcatccagaaccacagcccgtcaaatctcaaccgggacgacctgggcgcgcccaagacatgctatttcggcggcgtcctgcggaaccgcatttccagccagtgcctcaagcgaagtatccgccagagcgagcagttcagccgattactcggcagcattcggacccgcaggctggcggagatcatcagtggaaaagtgaatgggaacaaggacgccaagaaacgcgcgtcagaggtcctcaagaagtgcggctttgacgccaaggacgacggcaccactgatatggccatctatgtttcgcagagcgccattgacaagatggcgaaccttctgaaaacgcacaacggtgacgcggacgctctcgcccaggaattcgccaaactgatcgcgacggaagtggctgttcccgatatggccttgacggggcgaatgctggagacgaaggaactggctaagtacgatacgaccgtggaagcggcgttgcaggccgcgcatgccatctccactcattcggcgactccagaagtcgattatttcgtcgctgccgatgatcttcccggagatgatgccggagccgcctacctcgatgaagcgatgtttgcatccgcctgcttctacaaatatttttccatcgactgggaccagcttgtcagcaatctcaagggcaacaaggagctggccgcccacaccgtcggagccttcctgcggggcgcggctctggcaaaccccaccggcaaacaaaatagctttgccgcccataatccgcccgatggaatcgtcgttgagatcaaggatacgcccatcagctatgccaacgccttcgccgcccccgttcccctcaccggtccgcgggatatggtcactcagagcattgcccaactcggacagtacatccacgacatggacaccgggtttggcggcccgaagaaacgattctggttctcgcccaatcttcgctacaagctccaactcgacggggcccagggggcgagcggcgaatctgtggaatcgctggacaagctagtcggaagactcctgcatgaaatgggctttgactggcagaaggttcagacggtcaccatcaactaagggagattgttccgatggataccacgacagacaactgccccaataccctattccttcgtctcgaaggtccgctccaagcctggggccaacatgaatcgaagttcgccatccgacggacggcggaggccccgaccaagtcggggatcatcggcctactgtgtgcggcgatgggaatttcgcgggatgccttcccggagcatcggaaaagattcgactccttgcgtctggccgtccgaatcgattccccaggcgttcgctggtgggattatcacactgtcggagccgggatgcagatgccgatctcggaaggacctggaaaagcaagggaagggccgctactcagtcggcgagagtacctgtgcgatgctcgcttcctggtcgccctgcaaggtccggtggacctgatcggcgaactggccgcagcggttcagaagccgaaatggtcgttgtacctgggccgtaagtgctgcccgccgtcactgcccgtgtgggtggccgatccgagccgtcaggaaagcgttctttccgccattgtatccgtgccttatcaaaagcgattccgggacgatgaggttccgcctgttgtggactgcctgatggattggcagtccgacgacaatcacacggaggctccgtcggacgccgaggtgtggtacgatgttccggtgggtttcagtccacccgcccaccagccgcggttcgtgatccggcggcaactgacagtcggaccagacggtgacgtgaaagtggctcaagagcccctcctgaatcgaacgccggggccgaaaagaattcgcgcggactacaccaatacggaataccgaagacgccgggaacagcgtctagatgcggaccatggtctttgcgtcttctgcaaggctccggcgaccacggttcagcatatcacctatcgtcgtgccggaggcaatgaggcgcaggaagacttgcgttccctctgccgtctttgtcacgacgcggtaaccatgatcgaatacggcttgggcatgggcctggaccgaatcaaccccgaagacccgcaatggcgggatcagatcattgccaaacgccgagagattgtcgaatttcggtccctggagactcgtcgaaggcgcttgcagcccgaggaggtggaatgatgtatctatcgacgctgctcatcaacgtgggcgacaatccggaccggccccgccccggtcggctctggctgcggaacctctaccgcgtccatcagcgattgtgcatggcgtttccttcgaaggcacgtctggagaaggataaattctttcttcgtccgtatgatcctcaggaatttgcccaagggcatgtccacgtcaaccggacgcaggaaaccgggtttcttttccgcgttgatcctcaaccgggcgggaatgtggtgattcttgtgctctcggctattgagccgaactgggcatacgctttccataatgcggagcatctcctggcccactccccgcaggtcaaggaattcaacccatccttcacggaagggcagcacttcaggttcctgctgtccgcaaaccccacaagaagatgttcgaagaactccaaggatatccggggcaatcctctagacggcaaatggataggcaagcgtattcccgttccgttcgagaaactcaaggactggctggtcacccgtggcaagaagggcggttttggtatcgacgacgtggcaatccaatccggctacgtctacgttgacaaacgcgatggcatcctcgaaagcaagcgactgctgtcggtccgattcgagggcatcctgaccgttaccgaccccgaagcattccgcaagactcttatctccggcatcggaccggccaaggcctttggctttgggctgctttcactggcgaagtttgatcggccttaggccgtaagattcgggggggactgtaaaatcgttctttgacaaaggaataacacgtgcgactcaaaaacctccaggagattccgaagttcgccgacaagctcagctacctctacgtggaacatgcggtggtggatcgccatgaaaaagccatcgccctgcatcaggcggatgggacgacgcccgttccatccgccgcgttgggtgtgctcgtcctgggaccgggcaccacgatcacccacgccgccgttcaaacgctggccgacaataattgcctggtcatctggtccggcgaacagggcgttcggttctacgcccagggactcggcggctcgcgtcacagccgtaatatgatccatcaggcccgactcgtcagcaacgacctcacgcggctgcaagtggtcgtgcgaatgtactgcctccggttccgtgaacccgtggatatgaatctgacgcttcagcagcttcgcggcatggaaggtatccgcgttcgccagtcctacgccgacgccgcccgcgaagcgggcgtcacgtggcaaggccgatcttataaccgcgaaaagtgggactacagcgacccggtcaatcgcgcactgtcggcggcaaactcctgcctgtacggactggttcacgccgcaatcctctccgccgggtattccccggccctggggttcattcataccggtaaacaactgtccttcgtctacgatatcgccgatctgtataaggccgatctgaccattcccatggcattcaaactcgccgccgcgaacccgccgaacctggaacgcgaggtccgaatcgcctgccgcgaccgcttcaaggaaagccgtctgatggaaaaaattattccggatattgccaaggtgctggacgtcgatatcaaggcgttggaggcccagcccgacgaattcgccgacgacgcggctctgcccgccgagtggtggacgccccagagcattcccgcttccgtgccgattggaaagatactcaaactctgccccaaccccgacccgatagcaaaggaggaaaaagaccatgaccatcctgattctggaacgagtccaggcgtcactgcggggtgaactcacccgctggctgattcagccaaagacgggcgtcttcgtcggccatgtctccgcccgcgttcgacaactgctgtggttcaaagtcattcgctcggtcaaggacggagccgccctcctgatccattccgataacagcgaacagggcttcgccatccagagctacggcgataccagcaaggtcattacagacttcgaaggcattttgcttccaaaaaccccgaaatcagcgtaatatccagtatattccccacgcacgtgggggtgaaccgaaagcccatgaaaatatccgcaattgggcaaaatattccccacgcacgtgggggtgaaccgtccgcccccggatccgaagacggcattgccgaatattccccacgcacgtgggggtgaaccgtacgctccaatctggcggcggcgatgatattgatattccccacgcacgtgggggtgaaccggccactccctatttcattccctcccccctagcatattccccacgcacgtgggggtgaaccggggaggccccggcggaaaccttgacgcttggcatattccccacgcacgtgggggtgaaccgatccttgaggttgcagggtcgggaaacgtaccatattccccacgcacgtgggggtgaaccggcc

SEQ ID NO: 1118 - DNA, 103599 bp, Artificial Sequence
  Synthetic Oligonucleotide
  misc_feature (1)..(96571): n is a, c, g, or t
nnnnnnnnnnnnnnnnnnnnnnnnnnnnnnnnnnnnnnnnnnnnnnnnnnnnnnnnnnnnnnnnnnnnnnnnnnnnnnnnnnnnnnnnnnnnnnnnnnnnnnnnnnnnnnnnnnnnnnnnnnnnnnnnnnnnnnnnnnnnnnnnnnnnnnnnnnnnnnnnnnnnnnnnnnnnnnnnnnnnnnnnnnnnnnnnnnnnnnnnnnnnnnnnnnnnnnnnnnnnnnnnnnnnnnnnnnnnnnnnnnnnnnnnnnnnnnnnnnnnnnnnnnnnnnnnnnnnnnnnnnnnnnnnnnnnnnnnnnnnnnnnnnnnnnnnnnnnnnnnnnnnnnnnnnnnnnnnnnnnnnnnnnnnnnnnnnnnnnnnnnnnnnnnnnnnnnnnnnnnnnnnnnnnnnnnnnnnnnnnnnnnnnnnnnnnnnnnnnnnnnnnnnnnnnnnnnnnnnnnnnnnnnnnnnnnnnnnnnnnnnnnnnnnnnnnnnnnnnnnnnnnnnnnnnnnnnnnnnnnnnnnnnnnnnnnnnnnnnnnnnnnnnnnnnnnnnnnnnnnnnnnnnnnnnnnnnnnnnnnnnnnnnnnnnnnnnnnnnnnnnnnnnnnnnnnnnnnnnnnnnnnnnnnnnnnnnnnnnnnnnnnnnnnnnnnnnnnnnnnnnnnnnnnnnnnnnnnnnnnnnnnnnnnnnnnnnnnnnnnnnnnnnnnnnnnnnnnnnnnnnnnnnnnnnnnnnnnnnnnnnnnnnnnnnnnnnnnnnnnnnnnnnnnnnnnnnnnnnnnnnnnnnnnnnnnnnnnnnnnnnnnnnnnnnnnnnnnnnnnnnnnnnnnnnnnnnnnnnnnnnnnnnnnnnnnnnnnnnnnnnnnnnnnnnnnnnnnnnnnnnnnnnnnnnnnnnnnnnnnnnnnnnnnnnnnnnnnnnnnnnnnnnnnnnnnnnnnnnnnnnnnnnnnnnnnnnnnnnnnnnnnnnnnnnnnnnnnnnnnnnnnnnnnnnnnnnnnnnnnnnnnnnnnnnnnnnnnnnnnnnnnnnnnnnnnnnnnnnnnnnnnnnnnnnnnnnnnnnnnnnnnnnnnnnnnnnnnnnnnnnnnnnnnnnnnnnnnnnnnnnnnnnnnnnnnnnnnnnnnnnnnnnnnnnnnnnnnnnnnnnnnnnnnnnnnnnnnnnnnnnnnnnnnnnnnnnnnnnnnnnnnnnnnnnnnnnnnnnnnnnnnnnnnnnnnnnnnnnnnnnnnnnnnnnnnnnnnnnnnnnnnnnnnnnnnnnnnnnnnnnnnnnnnnnnnnnnnnnnnnnnnnnnnnnnnnnnnnnnnnnnnnnnnnnnnnnnnnnnnnnnnnnnnnnnnnnnnnnnnnnnnnnnnnnnnnnnnnnnnnnnnnnnnnnnnnnnnnnnnnnnnnnnnnnnnnnnnnnnnnnnnnnnnnnnnnnnnnnnnnnnnnnnnnnnnnnnnnnnnnnnnnnnnnnnnnnnnnnnnnnnnnnnnnnnnnnnnnnnnnnnnnnnnnnnnnnnnnnnnnnnnnnnnnnnnnnnnnnnnnnnnnnnnnnnnnnnnnnnnnnnnnnnnnnnnnnnnnnnnnnnnnnnnnnnnnnnnnnnnnnnnnnnnnnnnnnnnnnnnnnnnnnnnnnnnnnnnnnnnnnnnnnnnnnnnnnnnnnnnnnnnnnnnnnnnnnnnnnnnnnnnnnnnnnnnnnnnnnnnnnnnnnnnnnnnnnnnnnnnnnnnnnnnnnnnnnnnnnnnnnnnnnnnnnnnnnnnnnnnnnnnnnnnnnnnnnnnnnnnnnnnnnnnnnnnnnnnnnnnnnnnnnnnnnnnnnnnnnnnnnnnnnnnnnnnnnnnnnnnnnnnnnnnnnnnnnnnnnnnnnnnnnnnnnnnnnnnnnnnnnnnnnnnnnnnnnnnnnnnnnnnnnnnnnnnnnnnnnnnnnnnnnnnnnnnnnnnnnnnnnnnnnnnnnnnnnnnnnnnnnnnnnnnnnnnnnnnnnnnnnnnnnnnnnnnnnnnnnnnnnnnnnnnnnnnnnnnnnnnnnnnnnnnnnnnnnnnnnnnnnnnnnnnnnnnnnnnnnnnnnnnnnnnnnnnnnnnnnnnnnnnnnnnnnnnnnnnnnnnnnnnnnnnnnnnnnnnnnnnnnnnnnnnnnnnnnnnnnnnnnnnnnnnnnnnnnnnnnnnnnnnnnnnnnnnnnnnnnnnnnnnnnnnnnnnnnnnnnnnnnnnnnnnnnnnnnnnnnnnnnnnnnnnnnnnnnnnnnnnnnnnnnnnnnnnnnnnnnnnnnnnnnnnnnnnnnnnnnnnnnnnnnnnnnnnnnnnnnnnnnnnnnnnnnnnnnnnnnnnnnnnnnnnnnnnnnnnnnnnnnnnnnnnnnnnnnnnnnnnnnnnnnnnnnnnnnnnnnnnnnnnnnnnnnnnnnnnnnnnnnnnnnnnnnnnnnnnnnnnnnnnnnnnnnnnnnnnnnnnnnnnnnnnnnnnnnnnnnnnnnnnnnnnnnnnnnnnnnnnnnnnnnnnnnnnnnnnnnnnnnnnnnnnnnnnnnnnnnnnnnnnnnnnnnnnnnnnnnnnnnnnnnnnnnnnnnnnnnnnnnnnnnnnnnnnnnnnnnnnnnnnnnnnnnnnnnnnnnnnnnnnnnnnnnnnnnnnnnnnnnnnnnnnnnnnnnnnnnnnnnnnnnnnnnnnnnnnnnnnnnnnnnnnnnnnnnnnnnnnnnnnnnnnnnnnnnnnnnnnnnnnnnnnnnnnnnnnnnnnnnnnnnnnnnnnnnnnnnnnnnnnnnnnnnnnnnnnnnnnnnnnnnnnnnnnnnnnnnnnnnnnnnnnnnnnnnnnnnnnnnnnnnnnnnnnnnnnnnnnnnnnnnnnnnnnnnnnnnnnnnnnnnnnnnnnnnnnnnnnnnnnnnnnnnnnnnnnnnnnnnnnnnnnnnnnnnnnnnnnnnnnnnnnnnnnnnnnnnnnnnnnnnnnnnnnnnnnnnnnnnnnnnnnnnnnnnnnnnnnnnnnnnnnnnnnnnnnnnnnnnnnnnnnnnnnnnnnnnnnnnnnnnnnnnnnnnnnnnnnnnnnnnnnnnnnnnnnnnnnnnnnnnnnnnnnnnnnnnnnnnnnnnnnnnnnnnnnnnnnnnnnnnnnnnnnnnnnnnnnnnnnnnnnnnnnnnnnnnnnnnnnnnnnnnnnnnnnnnnnnnnnnnnnnnnnnnnnnnnnnnnnnnnnnnnnnnnnnnnnnnnnnnnnnnnnnnnnnnnnnnnnnnnnnnnnnnnnnnnnnnnnnnnnnnnnnnnnnnnnnnnnnnnnnnnnnnnnnnnnnnnnnnnnnnnnnnnnnnnnnnnnnnnnnnnnnnnnnnnnnnnnnnnnnnnnnnnnnnnnnnnnnnnnnnnnnnnnnnnnnnnnnnnnnnnnnnnnnnnnnnnnnnnnnnnnnnnnnnnnnnnnnnnnnnnnnnnnnnnnnnnnnnnnnnnnnnnnnnnnnnnnnnnnnnnnnnnnnnnnnnnnnnnnnnnnnnnnnnnnnnnnnnnnnnnnnnnnnnnnnnnnnnnnnnnnnnnnnnnnnnnnnnnnnnnnnnnnnnnnnnnnnnnnnnnnnnnnnnnnnnnnnnnnnnnnnnnnnnnnnnnnnnnnnnnnnnnnnnnnnnnnnnnnnnnnnnnnnnnnnnnnnnnnnnnnnnnnnnnnnnnnnnnnnnnnnnnnnnnnnnnnnnnnnnnnnnnnnnnnnnnnnnnnnnnnnnnnnnnnnnnnnnnnnnnnnnnnnnnnnnnnnnnnnnnnnnnnnnnnnnnnnnnnnnnnnnnnnnnnnnnnnnnnnnnnnnnnnnnnnnnnnnnnnnnnnnnnnnnnnnnnnnnnnnnnnnnnnnnnnnnnnnnnnnnnnnnnnnnnnnnnnnnnnnnnnnnnnnnnnnnnnnnnnnnnnnnnnnnnnnnnnnnnnnnnnnnnnnnnnnnnnnnnnnnnnnnnnnnnnnnnnnnnnnnnnnnnnnnnnnnnnnnnnnnnnnnnnnnnnnnnnnnnnnnnnnnnnnnnnnnnnnnnnnnnnnnnnnnnnnnnnnnnnnnnnnnnnnnnnnnnnnnnnnnnnnnnnnnnnnnnnnnnnnnnnnnnnnnnnnnnnnnnnnnnnnnnnnnnnnnnnnnnnnnnnnnnnnnnnnnnnnnnnnnnnnnnnnnnnnnnnnnnnnnnnnnnnnnnnnnnnnnnnnnnnnnnnnnnnnnnnnnnnnnnnnnnnnnnnnnnnnnnnnnnnnnnnnnnnnnnnnnnnnnnnnnnnnnnnnnnnnnnnnnnnnnnnnnnnnnnnnnnnnnnnnnnnnnnnnnnnnnnnnnnnnnnnnnnnnnnnnnnnnnnnnnnnnnnnnnnnnnnnnnnnnnnnnnnnnnnnnnnnnnnnnnnnnnnnnnnnnnnnnnnnnnnnnnnnnnnnnnnnnnnnnnnnnnnnnnnnnnnnnnnnnnnnnnnnnnnnnnnnnnnnnnnnnnnnnnnnnnnnnnnnnnnnnnnnnnnnnnnnnnnnnnnnnnnnnnnnnnnnnnnnnnnnnnnnnnnnnnnnnnnnnnnnnnnnnnnnnnnnnnnnnnnnnnnnnnnnnnnnnnnnnnnnnnnnnnnnnnnnnnnnnnnnnnnnnnnnnnnnnnnnnnnnnnnnnnnnnnnnnnnnnnnnnnnnnnnnnnnnnnnnnnnnnnnnnnnnnnnnnnnnnnnnnnnnnnnnnnnnnnnnnnnnnnnnnnnnnnnnnnnnnnnnnnnnnnnnnnnnnnnnnnnnnnnnnnnnnnnnnnnnnnnnnnnnnnnnnnnnnnnnnnnnnnnnnnnnnnnnnnnnnnnnnnnnnnnnnnnnnnnnnnnnnnnnnnnnnnnnnnnnnnnnnnnnnnnnnnnnnnnnnnnnnnnnnnnnnnnnnnnnnnnnnnnnnnnnnnnnnnnnnnnnnnnnnnnnnnnnnnnnnnnnnnnnnnnnnnnnnnnnnnnnnnnnnnnnnnnnnnnnnnnnnnnnnnnnnnnnnnnnnnnnnnnnnnnnnnnnnnnnnnnnnnnnnnnnnnnnnnnnnnnnnnnnnnnnnnnnnnnnnnnnnnnnnnnnnnnnnnnnnnnnnnnnnnnnnnnnnnnnnnnnnnnnnnnnnnnnnnnnnnnnnnnnnnnnnnnnnnnnnnnnnnnnnnnnnnnnnnnnnnnnnnnnnnnnnnnnnnnnnnnnnnnnnnnnnnnnnnnnnnnnnnnnnnnnnnnnnnnnnnnnnnnnnnnnnnnnnnnnnnnnnnnnnnnnnnnnnnnnnnnnnnnnnnnnnnnnnnnnnnnnnnnnnnnnnnnnnnnnnnnnnnnnnnnnnnnnnnnnnnnnnnnnnnnnnnnnnnnnnnnnnnnnnnnnnnnnnnnnnnnnnnnnnnnnnnnnnnnnnnnnnnnnnnnnnnnnnnnnnnnnnnnnnnnnnnnnnnnnnnnnnnnnnnnnnnnnnnnnnnnnnnnnnnnnnnnnnnnnnnnnnnnnnnnnnnnnnnnnnnnnnnnnnnnnnnnnnnnnnnnnnnnnnnnnnnnnnnnnnnnnnnnnnnnnnnnnnnnnnnnnnnnnnnnnnnnnnnnnnnnnnnnnnnnnnnnnnnnnnnnnnnnnnnnnnnnnnnnnnnnnnnnnnnnnnnnnnnnnnnnnnnnnnnnnnnnnnnnnnnnnnnnnnnnnnnnnnnnnnnnnnnnnnnnnnnnnnnnnnnnnnnnnnnnnnnnnnnnnnnnnnnnnnnnnnnnnnnnnnnnnnnnnnnnnnnnnnnnnnnnnnnnnnnnnnnnnnnnnnnnnnnnnnnnnnnnnnnnnnnnnnnnnnnnnnnnnnnnnnnnnnnnnnnnnnnnnnnnnnnnnnnnnnnnnnnnnnnnnnnnnnnnnnnnnnnnnnnnnnnnnnnnnnnnnnnnnnnnnnnnnnnnnnnnnnnnnnnnnnnnnnnnnnnnnnnnnnnnnnnnnnnnnnnnnnnnnnnnnnnnnnnnnnnnnnnnnnnnnnnnnnnnnnnnnnnnnnnnnnnnnnnnnnnnnnnnnnnnnnnnnnnnnnnnnnnnnnnnnnnnnnnnnnnnnnnnnnnnnnnnnnnnnnnnnnnnnnnnnnnnnnnnnnnnnnnnnnnnnnnnnnnnnnnnnnnnnnnnnnnnnnnnnnnnnnnnnnnnnnnnnnnnnnnnnnnnnnnnnnnnnnnnnnnnnnnnnnnnnnnnnnnnnnnnnnnnnnnnnnnnnnnnnnnnnnnnnnnnnnnnnnnnnnnnnnnnnnnnnnnnnnnnnnnnnnnnnnnnnnnnnnnnnnnnnnnnnnnnnnnnnnnnnnnnnnnnnnnnnnnnnnnnnnnnnnnnnnnnnnnnnnnnnnnnnnnnnnnnnnnnnnnnnnnnnnnnnnnnnnnnnnnnnnnnnnnnnnnnnnnnnnnnnnnnnnnnnnnnnnnnnnnnnnnnnnnnnnnnnnnnnnnnnnnnnnnnnnnnnnnnnnnnnnnnnnnnnnnnnnnnnnnnnnnnnnnnnnnnnnnnnnnnnnnnnnnnnnnnnnnnnnnnnnnnnnnnnnnnnnnnnnnnnnnnnnnnnnnnnnnnnnnnnnnnnnnnnnnnnnnnnnnnnnnnnnnnnnnnnnnnnnnnnnnnnnnnnnnnnnnnnnnnnnnnnnnnnnnnnnnnnnnnnnnnnnnnnnnnnnnnnnnnnnnnnnnnnnnnnnnnnnnnnnnnnnnnnnnnnnnnnnnnnnnnnnnnnnnnnnnnnnnnnnnnnnnnnnnnnnnnnnnnnnnnnnnnnnnnnnnnnnnnnnnnnnnnnnnnnnnnnnnnnnnnnnnnnnnnnnnnnnnnnnnnnnnnnnnnnnnnnnnnnnnnnnnnnnnnnnnnnnnnnnnnnnnnnnnnnnnnnnnnnnnnnnnnnnnnnnnnnnnnnnnnnnnnnnnnnnnnnnnnnnnnnnnnnnnnnnnnnnnnnnnnnnnnnnnnnnnnnnnnnnnnnnnnnnnnnnnnnnnnnnnnnnnnnnnnnnnnnnnnnnnnnnnnnnnnnnnnnnnnnnnnnnnnnnnnnnnnnnnnnnnnnnnnnnnnnnnnnnnnnnnnnnnnnnnnnnnnnnnnnnnnnnnnnnnnnnnnnnnnnnnnnnnnnnnnnnnnnnnnnnnnnnnnnnnnnnnnnnnnnnnnnnnnnnnnnnnnnnnnnnnnnnnnnnnnnnnnnnnnnnnnnnnnnnnnnnnnnnnnnnnnnnnnnnnnnnnnnnnnnnnnnnnnnnnnnnnnnnnnnnnnnnnnnnnnnnnnnnnnnnnnnnnnnnnnnnnnnnnnnnnnnnnnnnnnnnnnnnnnnnnnnnnnnnnnnnnnnnnnnnnnnnnnnnnnnnnnnnnnnnnnnnnnnnnnnnnnnnnnnnnnnnnnnnnnnnnnnnnnnnnnnnnnnnnnnnnnnnnnnnnnnnnnnnnnnnnnnnnnnnnnnnnnnnnnnnnnnnnnnnnnnnnnnnnnnnnnnnnnnnnnnnnnnnnnnnnnnnnnnnnnnnnnnnnnnnnnnnnnnnnnnnnnnnnnnnnnnnnnnnnnnnnnnnnnnnnnnnnnnnnnnnnnnnnnnnnnnnnnnnnnnnnnnnnnnnnnnnnnnnnnnnnnnnnnnnnnnnnnnnnnnnnnnnnnnnnnnnnnnnnnnnnnnnnnnnnnnnnnnnnnnnnnnnnnnnnnnnnnnnnnnnnnnnnnnnnnnnnnnnnnnnnnnnnnnnnnnnnnnnnnnnnnnnnnnnnnnnnnnnnnnnnnnnnnnnnnnnnnnnnnnnnnnnnnnnnnnnnnnnnnnnnnnnnnnnnnnnnnnnnnnnnnnnnnnnnnnnnnnnnnnnnnnnnnnnnnnnnnnnnnnnnnnnnnnnnnnnnnnnnnnnnnnnnnnnnnnnnnnnnnnnnnnnnnnnnnnnnnnnnnnnnnnnnnnnnnnnnnnnnnnnnnnnnnnnnnnnnnnnnnnnnnnnnnnnnnnnnnnnnnnnnnnnnnnnnnnnnnnnnnnnnnnnnnnnnnnnnnnnnnnnnnnnnnnnnnnnnnnnnnnnnnnnnnnnnnnnnnnnnnnnnnnnnnnnnnnnnnnnnnnnnnnnnnnnnnnnnnnnnnnnnnnnnnnnnnnnnnnnnnnnnnnnnnnnnnnnnnnnnnnnnnnnnnnnnnnnnnnnnnnnnnnnnnnnnnnnnnnnnnnnnnnnnnnnnnnnnnnnnnnnnnnnnnnnnnnnnnnnnnnnnnnnnnnnnnnnnnnnnnnnnnnnnnnnnnnnnnnnnnnnnnnnnnnnnnnnnnnnnnnnnnnnnnnnnnnnnnnnnnnnnnnnnnnnnnnnnnnnnnnnnnnnnnnnnnnnnnnnnnnnnnnnnnnnnnnnnnnnnnnnnnnnnnnnnnnnnnnnnnnnnnnnnnnnnnnnnnnnnnnnnnnnnnnnnnnnnnnnnnnnnnnnnnnnnnnnnnnnnnnnnnnnnnnnnnnnnnnnnnnnnnnnnnnnnnnnnnnnnnnnnnnnnnnnnnnnnnnnnnnnnnnnnnnnnnnnnnnnnnnnnnnnnnnnnnnnnnnnnnnnnnnnnnnnnnnnnnnnnnnnnnnnnnnnnnnnnnnnnnnnnnnnnnnnnnnnnnnnnnnnnnnnnnnnnnnnnnnnnnnnnnnnnnnnnnnnnnnnnnnnnnnnnnnnnnnnnnnnnnnnnnnnnnnnnnnnnnnnnnnnnnnnnnnnnnnnnnnnnnnnnnnnnnnnnnnnnnnnnnnnnnnnnnnnnnnnnnnnnnnnnnnnnnnnnnnnnnnnnnnnnnnnnnnnnnnnnnnnnnnnnnnnnnnnnnnnnnnnnnnnnnnnnnnnnnnnnnnnnnnnnnnnnnnnnnnnnnnnnnnnnnnnnnnnnnnnnnnnnnnnnnnnnnnnnnnnnnnnnnnnnnnnnnnnnnnnnnnnnnnnnnnnnnnnnnnnnnnnnnnnnnnnnnnnnnnnnnnnnnnnnnnnnnnnnnnnnnnnnnnnnnnnnnnnnnnnnnnnnnnnnnnnnnnnnnnnnnnnnnnnnnnnnnnnnnnnnnnnnnnnnnnnnnnnnnnnnnnnnnnnnnnnnnnnnnnnnnnnnnnnnnnnnnnnnnnnnnnnnnnnnnnnnnnnnnnnnnnnnnnnnnnnnnnnnnnnnnnnnnnnnnnnnnnnnnnnnnnnnnnnnnnnnnnnnnnnnnnnnnnnnnnnnnnnnnnnnnnnnnnnnnnnnnnnnnnnnnnnnnnnnnnnnnnnnnnnnnnnnnnnnnnnnnnnnnnnnnnnnnnnnnnnnnnnnnnnnnnnnnnnnnnnnnnnnnnnnnnnnnnnnnnnnnnnnnnnnnnnnnnnnnnnnnnnnnnnnnnnnnnnnnnnnnnnnnnnnnnnnnnnnnnnnnnnnnnnnnnnnnnnnnnnnnnnnnnnnnnnnnnnnnnnnnnnnnnnnnnnnnnnnnnnnnnnnnnnnnnnnnnnnnnnnnnnnnnnnnnnnnnnnnnnnnnnnnnnnnnnnnnnnnnnnnnnnnnnnnnnnnnnnnnnnnnnnnnnnnnnnnnnnnnnnnnnnnnnnnnnnnnnnnnnnnnnnnnnnnnnnnnnnnnnnnnnnnnnnnnnnnnnnnnnnnnnnnnnnnnnnnnnnnnnnnnnnnnnnnnnnnnnnnnnnnnnnnnnnnnnnnnnnnnnnnnnnnnnnnnnnnnnnnnnnnnnnnnnnnnnnnnnnnnnnnnnnnnnnnnnnnnnnnnnnnnnnnnnnnnnnnnnnnnnnnnnnnnnnnnnnnnnnnnnnnnnnnnnnnnnnnnnnnnnnnnnnnnnnnnnnnnnnnnnnnnnnnnnnnnnnnnnnnnnnnnnnnnnnnnnnnnnnnnnnnnnnnnnnnnnnnnnnnnnnnnnnnnnnnnnnnnnnnnnnnnnnnnnnnnnnnnnnnnnnnnnnnnnnnnnnnnnnnnnnnnnnnnnnnnnnnnnnnnnnnnnnnnnnnnnnnnnnnnnnnnnnnnnnnnnnnnnnnnnnnnnnnnnnnnnnnnnnnnnnnnnnnnnnnnnnnnnnnnnnnnnnnnnnnnnnnnnnnnnnnnnnnnnnnnnnnnnnnnnnnnnnnnnnnnnnnnnnnnnnnnnnnnnnnnnnnnnnnnnnnnnnnnnnnnnnnnnnnnnnnnnnnnnnnnnnnnnnnnnnnnnnnnnnnnnnnnnnnnnnnnnnnnnnnnnnnnnnnnnnnnnnnnnnnnnnnnnnnnnnnnnnnnnnnnnnnnnnnnnnnnnnnnnnnnnnnnnnnnnnnnnnnnnnnnnnnnnnnnnnnnnnnnnnnnnnnnnnnnnnnnnnnnnnnnnnnnnnnnnnnnnnnnnnnnnnnnnnnnnnnnnnnnnnnnnnnnnnnnnnnnnnnnnnnnnnnnnnnnnnnnnnnnnnnnnnnnnnnnnnnnnnnnnnnnnnnnnnnnnnnnnnnnnnnnnnnnnnnnnnnnnnnnnnnnnnnnnnnnnnnnnnnnnnnnnnnnnnnnnnnnnnnnnnnnnnnnnnnnnnnnnnnnnnnnnnnnnnnnnnnnnnnnnnnnnnnnnnnnnnnnnnnnnnnnnnnnnnnnnnnnnnnnnnnnnnnnnnnnnnnnnnnnnnnnnnnnnnnnnnnnnnnnnnnnnnnnnnnnnnnnnnnnnnnnnnnnnnnnnnnnnnnnnnnnnnnnnnnnnnnnnnnnnnnnnnnnnnnnnnnnnnnnnnnnnnnnnnnnnnnnnnnnnnnnnnnnnnnnnnnnnnnnnnnnnnnnnnnnnnnnnnnnnnnnnnnnnnnnnnnnnnnnnnnnnnnnnnnnnnnnnnnnnnnnnnnnnnnnnnnnnnnnnnnnnnnnnnnnnnnnnnnnnnnnnnnnnnnnnnnnnnnnnnnnnnnnnnnnnnnnnnnnnnnnnnnnnnnnnnnnnnnnnnnnnnnnnnnnnnnnnnnnnnnnnnnnnnnnnnnnnnnnnnnnnnnnnnnnnnnnnnnnnnnnnnnnnnnnnnnnnnnnnnnnnnnnnnnnnnnnnnnnnnnnnnnnnnnnnnnnnnnnnnnnnnnnnnnnnnnnnnnnnnnnnnnnnnnnnnnnnnnnnnnnnnnnnnnnnnnnnnnnnnnnnnnnnnnnnnnnnnnnnnnnnnnnnnnnnnnnnnnnnnnnnnnnnnnnnnnnnnnnnnnnnnnnnnnnnnnnnnnnnnnnnnnnnnnnnnnnnnnnnnnnnnnnnnnnnnnnnnnnnnnnnnnnnnnnnnnnnnnnnnnnnnnnnnnnnnnnnnnnnnnnnnnnnnnnnnnnnnnnnnnnnnnnnnnnnnnnnnnnnnnnnnnnnnnnnnnnnnnnnnnnnnnnnnnnnnnnnnnnnnnnnnnnnnnnnnnnnnnnnnnnnnnnnnnnnnnnnnnnnnnnnnnnnnnnnnnnnnnnnnnnnnnnnnnnnnnnnnnnnnnnnnnnnnnnnnnnnnnnnnnnnnnnnnnnnnnnnnnnnnnnnnnnnnnnnnnnnnnnnnnnnnnnnnnnnnnnnnnnnnnnnnnnnnnnnnnnnnnnnnnnnnnnnnnnnnnnnnnnnnnnnnnnnnnnnnnnnnnnnnnnnnnnnnnnnnnnnnnnnnnnnnnnnnnnnnnnnnnnnnnnnnnnnnnnnnnnnnnnnnnnnnnnnnnnnnnnnnnnnnnnnnnnnnnnnnnnnnnnnnnnnnnnnnnnnnnnnnnnnnnnnnnnnnnnnnnnnnnnnnnnnnnnnnnnnnnnnnnnnnnnnnnnnnnnnnnnnnnnnnnnnnnnnnnnnnnnnnnnnnnnnnnnnnnnnnnnnnnnnnnnnnnnnnnnnnnnnnnnnnnnnnnnnnnnnnnnnnnnnnnnnnnnnnnnnnnnnnnnnnnnnnnnnnnnnnnnnnnnnnnnnnnnnnnnnnnnnnnnnnnnnnnnnnnnnnnnnnnnnnnnnnnnnnnnnnnnnnnnnnnnnnnnnnnnnnnnnnnnnnnnnnnnnnnnnnnnnnnnnnnnnnnnnnnnnnnnnnnnnnnnnnnnnnnnnnnnnnnnnnnnnnnnnnnnnnnnnnnnnnnnnnnnnnnnnnnnnnnnnnnnnnnnnnnnnnnnnnnnnnnnnnnnnnnnnnnnnnnnnnnnnnnnnnnnnnnnnnnnnnnnnnnnnnnnnnnnnnnnnnnnnnnnnnnnnnnnnnnnnnnnnnnnnnnnnnnnnnnnnnnnnnnnnnnnnnnnnnnnnnnnnnnnnnnnnnnnnnnnnnnnnnnnnnnnnnnnnnnnnnnnnnnnnnnnnnnnnnnnnnnnnnnnnnnnnnnnnnnnnnnnnnnnnnnnnnnnnnnnnnnnnnnnnnnnnnnnnnnnnnnnnnnnnnnnnnnnnnnnnnnnnnnnnnnnnnnnnnnnnnnnnnnnnnnnnnnnnnnnnnnnnnnnnnnnnnnnnnnnnnnnnnnnnnnnnnnnnnnnnnnnnnnnnnnnnnnnnnnnnnnnnnnnnnnnnnnnnnnnnnnnnnnnnnnnnnnnnnnnnnnnnnnnnnnnnnnnnnnnnnnnnnnnnnnnnnnnnnnnnnnnnnnnnnnnnnnnnnnnnnnnnnnnnnnnnnnnnnnnnnnnnnnnnnnnnnnnnnnnnnnnnnnnnnnnnnnnnnnnnnnnnnnnnnnnnnnnnnnnnnnnnnnnnnnnnnnnnnnnnnnnnnnnnnnnnnnnnnnnnnnnnnnnnnnnnnnnnnnnnnnnnnnnnnnnnnnnnnnnnnnnnnnnnnnnnnnnnnnnnnnnnnnnnnnnnnnnnnnnnnnnnnnnnnnnnnnnnnnnnnnnnnnnnnnnnnnnnnnnnnnnnnnnnnnnnnnnnnnnnnnnnnnnnnnnnnnnnnnnnnnnnnnnnnnnnnnnnnnnnnnnnnnnnnnnnnnnnnnnnnnnnnnnnnnnnnnnnnnnnnnnnnnnnnnnnnnnnnnnnnnnnnnnnnnnnnnnnnnnnnnnnnnnnnnnnnnnnnnnnnnnnnnnnnnnnnnnnnnnnnnnnnnnnnnnnnnnnnnnnnnnnnnnnnnnnnnnnnnnnnnnnnnnnnnnnnnnnnnnnnnnnnnnnnnnnnnnnnnnnnnnnnnnnnnnnnnnnnnnnnnnnnnnnnnnnnnnnnnnnnnnnnnnnnnnnnnnnnnnnnnnnnnnnnnnnnnnnnnnnnnnnnnnnnnnnnnnnnnnnnnnnnnnnnnnnnnnnnnnnnnnnnnnnnnnnnnnnnnnnnnnnnnnnnnnnnnnnnnnnnnnnnnnnnnnnnnnnnnnnnnnnnnnnnnnnnnnnnnnnnnnnnnnnnnnnnnnnnnnnnnnnnnnnnnnnnnnnnnnnnnnnnnnnnnnnnnnnnnnnnnnnnnnnnnnnnnnnnnnnnnnnnnnnnnnnnnnnnnnnnnnnnnnnnnnnnnnnnnnnnnnnnnnnnnnnnnnnnnnnnnnnnnnnnnnnnnnnnnnnnnnnnnnnnnnnnnnnnnnnnnnnnnnnnnnnnnnnnnnnnnnnnnnnnnnnnnnnnnnnnnnnnnnnnnnnnnnnnnnnnnnnnnnnnnnnnnnnnnnnnnnnnnnnnnnnnnnnnnnnnnnnnnnnnnnnnnnnnnnnnnnnnnnnnnnnnnnnnnnnnnnnnnnnnnnnnnnnnnnnnnnnnnnnnnnnnnnnnnnnnnnnnnnnnnnnnnnnnnnnnnnnnnnnnnnnnnnnnnnnnnnnnnnnnnnnnnnnnnnnnnnnnnnnnnnnnnnnnnnnnnnnnnnnnnnnnnnnnnnnnnnnnnnnnnnnnnnnnnnnnnnnnnnnnnnnnnnnnnnnnnnnnnnnnnnnnnnnnnnnnnnnnnnnnnnnnnnnnnnnnnnnnnnnnnnnnnnnnnnnnnnnnnnnnnnnnnnnnnnnnnnnnnnnnnnnnnnnnnnnnnnnnnnnnnnnnnnnnnnnnnnnnnnnnnnnnnnnnnnnnnnnnnnnnnnnnnnnnnnnnnnnnnnnnnnnnnnnnnnnnnnnnnnnnnnnnnnnnnnnnnnnnnnnnnnnnnnnnnnnnnnnnnnnnnnnnnnnnnnnnnnnnnnnnnnnnnnnnnnnnnnnnnnnnnnnnnnnnnnnnnnnnnnnnnnnnnnnnnnnnnnnnnnnnnnnnnnnnnnnnnnnnnnnnnnnnnnnnnnnnnnnnnnnnnnnnnnnnnnnnnnnnnnnnnnnnnnnnnnnnnnnnnnnnnnnnnnnnnnnnnnnnnnnnnnnnnnnnnnnnnnnnnnnnnnnnnnnnnnnnnnnnnnnnnnnnnnnnnnnnnnnnnnnnnnnnnnnnnnnnnnnnnnnnnnnnnnnnnnnnnnnnnnnnnnnnnnnnnnnnnnnnnnnnnnnnnnnnnnnnnnnnnnnnnnnnnnnnnnnnnnnnnnnnnnnnnnnnnnnnnnnnnnnnnnnnnnnnnnnnnnnnnnnnnnnnnnnnnnnnnnnnnnnnnnnnnnnnnnnnnnnnnnnnnnnnnnnnnnnnnnnnnnnnnnnnnnnnnnnnnnnnnnnnnnnnnnnnnnnnnnnnnnnnnnnnnnnnnnnnnnnnnnnnnnnnnnnnnnnnnnnnnnnnnnnnnnnnnnnnnnnnnnnnnnnnnnnnnnnnnnnnnnnnnnnnnnnnnnnnnnnnnnnnnnnnnnnnnnnnnnnnnnnnnnnnnnnnnnnnnnnnnnnnnnnnnnnnnnnnnnnnnnnnnnnnnnnnnnnnnnnnnnnnnnnnnnnnnnnnnnnnnnnnnnnnnnnnnnnnnnnnnnnnnnnnnnnnnnnnnnnnnnnnnnnnnnnnnnnnnnnnnnnnnnnnnnnnnnnnnnnnnnnnnnnnnnnnnnnnnnnnnnnnnnnnnnnnnnnnnnnnnnnnnnnnnnnnnnnnnnnnnnnnnnnnnnnnnnnnnnnnnnnnnnnnnnnnnnnnnnnnnnnnnnnnnnnnnnnnnnnnnnnnnnnnnnnnnnnnnnnnnnnnnnnnnnnnnnnnnnnnnnnnnnnnnnnnnnnnnnnnnnnnnnnnnnnnnnnnnnnnnnnnnnnnnnnnnnnnnnnnnnnnnnnnnnnnnnnnnnnnnnnnnnnnnnnnnnnnnnnnnnnnnnnnnnnnnnnnnnnnnnnnnnnnnnnnnnnnnnnnnnnnnnnnnnnnnnnnnnnnnnnnnnnnnnnnnnnnnnnnnnnnnnnnnnnnnnnnnnnnnnnnnnnnnnnnnnnnnnnnnnnnnnnnnnnnnnnnnnnnnnnnnnnnnnnnnnnnnnnnnnnnnnnnnnnnnnnnnnnnnnnnnnnnnnnnnnnnnnnnnnnnnnnnnnnnnnnnnnnnnnnnnnnnnnnnnnnnnnnnnnnnnnnnnnnnnnnnnnnnnnnnnnnnnnnnnnnnnnnnnnnnnnnnnnnnnnnnnnnnnnnnnnnnnnnnnnnnnnnnnnnnnnnnnnnnnnnnnnnnnnnnnnnnnnnnnnnnnnnnnnnnnnnnnnnnnnnnnnnnnnnnnnnnnnnnnnnnnnnnnnnnnnnnnnnnnnnnnnnnnnnnnnnnnnnnnnnnnnnnnnnnnnnnnnnnnnnnnnnnnnnnnnnnnnnnnnnnnnnnnnnnnnnnnnnnnnnnnnnnnnnnnnnnnnnnnnnnnnnnnnnnnnnnnnnnnnnnnnnnnnnnnnnnnnnnnnnnnnnnnnnnnnnnnnnnnnnnnnnnnnnnnnnnnnnnnnnnnnnnnnnnnnnnnnnnnnnnnnnnnnnnnnnnnnnnnnnnnnnnnnnnnnnnnnnnnnnnnnnnnnnnnnnnnnnnnnnnnnnnnnnnnnnnnnnnnnnnnnnnnnnnnnnnnnnnnnnnnnnnnnnnnnnnnnnnnnnnnnnnnnnnnnnnnnnnnnnnnnnnnnnnnnnnnnnnnnnnnnnnnnnnnnnnnnnnnnnnnnnnnnnnnnnnnnnnnnnnnnnnnnnnnnnnnnnnnnnnnnnnnnnnnnnnnnnnnnnnnnnnnnnnnnnnnnnnnnnnnnnnnnnnnnnnnnnnnnnnnnnnnnnnnnnnnnnnnnnnnnnnnnnnnnnnnnnnnnnnnnnnnnnnnnnnnnnnnnnnnnnnnnnnnnnnnnnnnnnnnnnnnnnnnnnnnnnnnnnnnnnnnnnnnnnnnnnnnnnnnnnnnnnnnnnnnnnnnnnnnnnnnnnnnnnnnnnnnnnnnnnnnnnnnnnnnnnnnnnnnnnnnnnnnnnnnnnnnnnnnnnnnnnnnnnnnnnnnnnnnnnnnnnnnnnnnnnnnnnnnnnnnnnnnnnnnnnnnnnnnnnnnnnnnnnnnnnnnnnnnnnnnnnnnnnnnnnnnnnnnnnnnnnnnnnnnnnnnnnnnnnnnnnnnnnnnnnnnnnnnnnnnnnnnnnnnnnnnnnnnnnnnnnnnnnnnnnnnnnnnnnnnnnnnnnnnnnnnnnnnnnnnnnnnnnnnnnnnnnnnnnnnnnnnnnnnnnnnnnnnnnnnnnnnnnnnnnnnnnnnnnnnnnnnnnnnnnnnnnnnnnnnnnnnnnnnnnnnnnnnnnnnnnnnnnnnnnnnnnnnnnnnnnnnnnnnnnnnnnnnnnnnnnnnnnnnnnnnnnnnnnnnnnnnnnnnnnnnnnnnnnnnnnnnnnnnnnnnnnnnnnnnnnnnnnnnnnnnnnnnnnnnnnnnnnnnnnnnnnnnnnnnnnnnnnnnnnnnnnnnnnnnnnnnnnnnnnnnnnnnnnnnnnnnnnnnnnnnnnnnnnnnnnnnnnnnnnnnnnnnnnnnnnnnnnnnnnnnnnnnnnnnnnnnnnnnnnnnnnnnnnnnnnnnnnnnnnnnnnnnnnnnnnnnnnnnnnnnnnnnnnnnnnnnnnnnnnnnnnnnnnnnnnnnnnnnnnnnnnnnnnnnnnnnnnnnnnnnnnnnnnnnnnnnnnnnnnnnnnnnnnnnnnnnnnnnnnnnnnnnnnnnnnnnnnnnnnnnnnnnnnnnnnnnnnnnnnnnnnnnnnnnnnnnnnnnnnnnnnnnnnnnnnnnnnnnnnnnnnnnnnnnnnnnnnnnnnnnnnnnnnnnnnnnnnnnnnnnnnnnnnnnnnnnnnnnnnnnnnnnnnnnnnnnnnnnnnnnnnnnnnnnnnnnnnnnnnnnnnnnnnnnnnnnnnnnnnnnnnnnnnnnnnnnnnnnnnnnnnnnnnnnnnnnnnnnnnnnnnnnnnnnnnnnnnnnnnnnnnnnnnnnnnnnnnnnnnnnnnnnnnnnnnnnnnnnnnnnnnnnnnnnnnnnnnnnnnnnnnnnnnnnnnnnnnnnnnnnnnnnnnnnnnnnnnnnnnnnnnnnnnnnnnnnnnnnnnnnnnnnnnnnnnnnnnnnnnnnnnnnnnnnnnnnnnnnnnnnnnnnnnnnnnnnnnnnnnnnnnnnnnnnnnnnnnnnnnnnnnnnnnnnnnnnnnnnnnnnnnnnnnnnnnnnnnnnnnnnnnnnnnnnnnnnnnnnnnnnnnnnnnnnnnnnnnnnnnnnnnnnnnnnnnnnnnnnnnnnnnnnnnnnnnnnnnnnnnnnnnnnnnnnnnnnnnnnnnnnnnnnnnnnnnnnnnnnnnnnnnnnnnnnnnnnnnnnnnnnnnnnnnnnnnnnnnnnnnnnnnnnnnnnnnnnnnnnnnnnnnnnnnnnnnnnnnnnnnnnnnnnnnnnnnnnnnnnnnnnnnnnnnnnnnnnnnnnnnnnnnnnnnnnnnnnnnnnnnnnnnnnnnnnnnnnnnnnnnnnnnnnnnnnnnnnnnnnnnnnnnnnnnnnnnnnnnnnnnnnnnnnnnnnnnnnnnnnnnnnnnnnnnnnnnnnnnnnnnnnnnnnnnnnnnnnnnnnnnnnnnnnnnnnnnnnnnnnnnnnnnnnnnnnnnnnnnnnnnnnnnnnnnnnnnnnnnnnnnnnnnnnnnnnnnnnnnnnnnnnnnnnnnnnnnnnnnnnnnnnnnnnnnnnnnnnnnnnnnnnnnnnnnnnnnnnnnnnnnnnnnnnnnnnnnnnnnnnnnnnnnnnnnnnnnnnnnnnnnnnnnnnnnnnnnnnnnnnnnnnnnnnnnnnnnnnnnnnnnnnnnnnnnnnnnnnnnnnnnnnnnnnnnnnnnnnnnnnnnnnnnnnnnnnnnnnnnnnnnnnnnnnnnnnnnnnnnnnnnnnnnnnnnnnnnnnnnnnnnnnnnnnnnnnnnnnnnnnnnnnnnnnnnnnnnnnnnnnnnnnnnnnnnnnnnnnnnnnnnnnnnnnnnnnnnnnnnnnnnnnnnnnnnnnnnnnnnnnnnnnnnnnnnnnnnnnnnnnnnnnnnnnnnnnnnnnnnnnnnnnnnnnnnnnnnnnnnnnnnnnnnnnnnnnnnnnnnnnnnnnnnnnnnnnnnnnnnnnnnnnnnnnnnnnnnnnnnnnnnnnnnnnnnnnnnnnnnnnnnnnnnnnnnnnnnnnnnnnnnnnnnnnnnnnnnnnnnnnnnnnnnnnnnnnnnnnnnnnnnnnnnnnnnnnnnnnnnnnnnnnnnnnnnnnnnnnnnnnnnnnnnnnnnnnnnnnnnnnnnnnnnnnnnnnnnnnnnnnnnnnnnnnnnnnnnnnnnnnnnnnnnnnnnnnnnnnnnnnnnnnnnnnnnnnnnnnnnnnnnnnnnnnnnnnnnnnnnnnnnnnnnnnnnnnnnnnnnnnnnnnnnnnnnnnnnnnnnnnnnnnnnnnnnnnnnnnnnnnnnnnnnnnnnnnnnnnnnnnnnnnnnnnnnnnnnnnnnnnnnnnnnnnnnnnnnnnnnnnnnnnnnnnnnnnnnnnnnnnnnnnnnnnnnnnnnnnnnnnnnnnnnnnnnnnnnnnnnnnnnnnnnnnnnnnnnnnnnnnnnnnnnnnnnnnnnnnnnnnnnnnnnnnnnnnnnnnnnnnnnnnnnnnnnnnnnnnnnnnnnnnnnnnnnnnnnnnnnnnnnnnnnnnnnnnnnnnnnnnnnnnnnnnnnnnnnnnnnnnnnnnnnnnnnnnnnnnnnnnnnnnnnnnnnnnnnnnnnnnnnnnnnnnnnnnnnnnnnnnnnnnnnnnnnnnnnnnnnnnnnnnnnnnnnnnnnnnnnnnnnnnnnnnnnnnnnnnnnnnnnnnnnnnnnnnnnnnnnnnnnnnnnnnnnnnnnnnnnnnnnnnnnnnnnnnnnnnnnnnnnnnnnnnnnnnnnnnnnnnnnnnnnnnnnnnnnnnnnnnnnnnnnnnnnnnnnnnnnnnnnnnnnnnnnnnnnnnnnnnnnnnnnnnnnnnnnnnnnnnnnnnnnnnnnnnnnnnnnnnnnnnnnnnnnnnnnnnnnnnnnnnnnnnnnnnnnnnnnnnnnnnnnnnnnnnnnnnnnnnnnnnnnnnnnnnnnnnnnnnnnnnnnnnnnnnnnnnnnnnnnnnnnnnnnnnnnnnnnnnnnnnnnnnnnnnnnnnnnnnnnnnnnnnnnnnnnnnnnnnnnnnnnnnnnnnnnnnnnnnnnnnnnnnnnnnnnnnnnnnnnnnnnnnnnnnnnnnnnnnnnnnnnnnnnnnnnnnnnnnnnnnnnnnnnnnnnnnnnnnnnnnnnnnnnnnnnnnnnnnnnnnnnnnnnnnnnnnnnnnnnnnnnnnnnnnnnnnnnnnnnnnnnnnnnnnnnnnnnnnnnnnnnnnnnnnnnnnnnnnnnnnnnnnnnnnnnnnnnnnnnnnnnnnnnnnnnnnnnnnnnnnnnnnnnnnnnnnnnnnnnnnnnnnnnnnnnnnnnnnnnnnnnnnnnnnnnnnnnnnnnnnnnnnnnnnnnnnnnnnnnnnnnnnnnnnnnnnnnnnnnnnnnnnnnnnnnnnnnnnnnnnnnnnnnnnnnnnnnnnnnnnnnnnnnnnnnnnnnnnnnnnnnnnnnnnnnnnnnnnnnnnnnnnnnnnnnnnnnnnnnnnnnnnnnnnnnnnnnnnnnnnnnnnnnnnnnnnnnnnnnnnnnnnnnnnnnnnnnnnnnnnnnnnnnnnnnnnnnnnnnnnnnnnnnnnnnnnnnnnnnnnnnnnnnnnnnnnnnnnnnnnnnnnnnnnnnnnnnnnnnnnnnnnnnnnnnnnnnnnnnnnnnnnnnnnnnnnnnnnnnnnnnnnnnnnnnnnnnnnnnnnnnnnnnnnnnnnnnnnnnnnnnnnnnnnnnnnnnnnnnnnnnnnnnnnnnnnnnnnnnnnnnnnnnnnnnnnnnnnnnnnnnnnnnnnnnnnnnnnnnnnnnnnnnnnnnnnnnnnnnnnnnnnnnnnnnnnnnnnnnnnnnnnnnnnnnnnnnnnnnnnnnnnnnnnnnnnnnnnnnnnnnnnnnnnnnnnnnnnnnnnnnnnnnnnnnnnnnnnnnnnnnnnnnnnnnnnnnnnnnnnnnnnnnnnnnnnnnnnnnnnnnnnnnnnnnnnnnnnnnnnnnnnnnnnnnnnnnnnnnnnnnnnnnnnnnnnnnnnnnnnnnnnnnnnnnnnnnnnnnnnnnnnnnnnnnnnnnnnnnnnnnnnnnnnnnnnnnnnnnnnnnnnnnnnnnnnnnnnnnnnnnnnnnnnnnnnnnnnnnnnnnnnnnnnnnnnnnnnnnnnnnnnnnnnnnnnnnnnnnnnnnnnnnnnnnnnnnnnnnnnnnnnnnnnnnnnnnnnnnnnnnnnnnnnnnnnnnnnnnnnnnnnnnnnnnnnnnnnnnnnnnnnnnnnnnnnnnnnnnnnnnnnnnnnnnnnnnnnnnnnnnnnnnnnnnnnnnnnnnnnnnnnnnnnnnnnnnnnnnnnnnnnnnnnnnnnnnnnnnnnnnnnnnnnnnnnnnnnnnnnnnnnnnnnnnnnnnnnnnnnnnnnnnnnnnnnnnnnnnnnnnnnnnnnnnnnnnnnnnnnnnnnnnnnnnnnnnnnnnnnnnnnnnnnnnnnnnnnnnnnnnnnnnnnnnnnnnnnnnnnnnnnnnnnnnnnnnnnnnnnnnnnnnnnnnnnnnnnnnnnnnnnnnnnnnnnnnnnnnnnnnnnnnnnnnnnnnnnnnnnnnnnnnnnnnnnnnnnnnnnnnnnnnnnnnnnnnnnnnnnnnnnnnnnnnnnnnnnnnnnnnnnnnnnnnnnnnnnnnnnnnnnnnnnnnnnnnnnnnnnnnnnnnnnnnnnnnnnnnnnnnnnnnnnnnnnnnnnnnnnnnnnnnnnnnnnnnnnnnnnnnnnnnnnnnnnnnnnnnnnnnnnnnnnnnnnnnnnnnnnnnnnnnnnnnnnnnnnnnnnnnnnnnnnnnnnnnnnnnnnnnnnnnnnnnnnnnnnnnnnnnnnnnnnnnnnnnnnnnnnnnnnnnnnnnnnnnnnnnnnnnnnnnnnnnnnnnnnnnnnnnnnnnnnnnnnnnnnnnnnnnnnnnnnnnnnnnnnnnnnnnnnnnnnnnnnnnnnnnnnnnnnnnnnnnnnnnnnnnnnnnnnnnnnnnnnnnnnnnnnnnnnnnnnnnnnnnnnnnnnnnnnnnnnnnnnnnnnnnnnnnnnnnnnnnnnnnnnnnnnnnnnnnnnnnnnnnnnnnnnnnnnnnnnnnnnnnnnnnnnnnnnnnnnnnnnnnnnnnnnnnnnnnnnnnnnnnnnnnnnnnnnnnnnnnnnnnnnnnnnnnnnnnnnnnnnnnnnnnnnnnnnnnnnnnnnnnnnnnnnnnnnnnnnnnnnnnnnnnnnnnnnnnnnnnnnnnnnnnnnnnnnnnnnnnnnnnnnnnnnnnnnnnnnnnnnnnnnnnnnnnnnnnnnnnnnnnnnnnnnnnnnnnnnnnnnnnnnnnnnnnnnnnnnnnnnnnnnnnnnnnnnnnnnnnnnnnnnnnnnnnnnnnnnnnnnnnnnnnnnnnnnnnnnnnnnnnnnnnnnnnnnnnnnnnnnnnnnnnnnnnnnnnnnnnnnnnnnnnnnnnnnnnnnnnnnnnnnnnnnnnnnnnnnnnnnnnnnnnnnnnnnnnnnnnnnnnnnnnnnnnnnnnnnnnnnnnnnnnnnnnnnnnnnnnnnnnnnnnnnnnnnnnnnnnnnnnnnnnnnnnnnnnnnnnnnnnnnnnnnnnnnnnnnnnnnnnnnnnnnnnnnnnnnnnnnnnnnnnnnnnnnnnnnnnnnnnnnnnnnnnnnnnnnnnnnnnnnnnnnnnnnnnnnnnnnnnnnnnnnnnnnnnnnnnnnnnnnnnnnnnnnnnnnnnnnnnnnnnnnnnnnnnnnnnnnnnnnnnnnnnnnnnnnnnnnnnnnnnnnnnnnnnnnnnnnnnnnnnnnnnnnnnnnnnnnnnnnnnnnnnnnnnnnnnnnnnnnnnnnnnnnnnnnnnnnnnnnnnnnnnnnnnnnnnnnnnnnnnnnnnnnnnnnnnnnnnnnnnnnnnnnnnnnnnnnnnnnnnnnnnnnnnnnnnnnnnnnnnnnnnnnnnnnnnnnnnnnnnnnnnnnnnnnnnnnnnnnnnnnnnnnnnnnnnnnnnnnnnnnnnnnnnnnnnnnnnnnnnnnnnnnnnnnnnnnnnnnnnnnnnnnnnnnnnnnnnnnnnnnnnnnnnnnnnnnnnnnnnnnnnnnnnnnnnnnnnnnnnnnnnnnnnnnnnnnnnnnnnnnnnnnnnnnnnnnnnnnnnnnnnnnnnnnnnnnnnnnnnnnnnnnnnnnnnnnnnnnnnnnnnnnnnnnnnnnnnnnnnnnnnnnnnnnnnnnnnnnnnnnnnnnnnnnnnnnnnnnnnnnnnnnnnnnnnnnnnnnnnnnnnnnnnnnnnnnnnnnnnnnnnnnnnnnnnnnnnnnnnnnnnnnnnnnnnnnnnnnnnnnnnnnnnnnnnnnnnnnnnnnnnnnnnnnnnnnnnnnnnnnnnnnnnnnnnnnnnnnnnnnnnnnnnnnnnnnnnnnnnnnnnnnnnnnnnnnnnnnnnnnnnnnnnnnnnnnnnnnnnnnnnnnnnnnnnnnnnnnnnnnnnnnnnnnnnnnnnnnnnnnnnnnnnnnnnnnnnnnnnnnnnnnnnnnnnnnnnnnnnnnnnnnnnnnnnnnnnnnnnnnnnnnnnnnnnnnnnnnnnnnnnnnnnnnnnnnnnnnnnnnnnnnnnnnnnnnnnnnnnnnnnnnnnnnnnnnnnnnnnnnnnnnnnnnnnnnnnnnnnnnnnnnnnnnnnnnnnnnnnnnnnnnnnnnnnnnnnnnnnnnnnnnnnnnnnnnnnnnnnnnnnnnnnnnnnnnnnnnnnnnnnnnnnnnnnnnnnnnnnnnnnnnnnnnnnnnnnnnnnnnnnnnnnnnnnnnnnnnnnnnnnnnnnnnnnnnnnnnnnnnnnnnnnnnnnnnnnnnnnnnnnnnnnnnnnnnnnnnnnnnnnnnnnnnnnnnnnnnnnnnnnnnnnnnnnnnnnnnnnnnnnnnnnnnnnnnnnnnnnnnnnnnnnnnnnnnnnnnnnnnnnnnnnnnnnnnnnnnnnnnnnnnnnnnnnnnnnnnnnnnnnnnnnnnnnnnnnnnnnnnnnnnnnnnnnnnnnnnnnnnnnnnnnnnnnnnnnnnnnnnnnnnnnnnnnnnnnnnnnnnnnnnnnnnnnnnnnnnnnnnnnnnnnnnnnnnnnnnnnnnnnnnnnnnnnnnnnnnnnnnnnnnnnnnnnnnnnnnnnnnnnnnnnnnnnnnnnnnnnnnnnnnnnnnnnnnnnnnnnnnnnnnnnnnnnnnnnnnnnnnnnnnnnnnnnnnnnnnnnnnnnnnnnnnnnnnnnnnnnnnnnnnnnnnnnnnnnnnnnnnnnnnnnnnnnnnnnnnnnnnnnnnnnnnnnnnnnnnnnnnnnnnnnnnnnnnnnnnnnnnnnnnnnnnnnnnnnnnnnnnnnnnnnnnnnnnnnnnnnnnnnnnnnnnnnnnnnnnnnnnnnnnnnnnnnnnnnnnnnnnnnnnnnnnnnnnnnnnnnnnnnnnnnnnnnnnnnnnnnnnnnnnnnnnnnnnnnnnnnnnnnnnnnnnnnnnnnnnnnnnnnnnnnnnnnnnnnnnnnnnnnnnnnnnnnnnnnnnnnnnnnnnnnnnnnnnnnnnnnnnnnnnnnnnnnnnnnnnnnnnnnnnnnnnnnnnnnnnnnnnnnnnnnnnnnnnnnnnnnnnnnnnnnnnnnnnnnnnnnnnnnnnnnnnnnnnnnnnnnnnnnnnnnnnnnnnnnnnnnnnnnnnnnnnnnnnnnnnnnnnnnnnnnnnnnnnnnnnnnnnnnnnnnnnnnnnnnnnnnnnnnnnnnnnnnnnnnnnnnnnnnnnnnnnnnnnnnnnnnnnnnnnnnnnnnnnnnnnnnnnnnnnnnnnnnnnnnnnnnnnnnnnnnnnnnnnnnnnnnnnnnnnnnnnnnnnnnnnnnnnnnnnnnnnnnnnnnnnnnnnnnnnnnnnnnnnnnnnnnnnnnnnnnnnnnnnnnnnnnnnnnnnnnnnnnnnnnnnnnnnnnnnnnnnnnnnnnnnnnnnnnnnnnnnnnnnnnnnnnnnnnnnnnnnnnnnnnnnnnnnnnnnnnnnnnnnnnnnnnnnnnnnnnnnnnnnnnnnnnnnnnnnnnnnnnnnnnnnnnnnnnnnnnnnnnnnnnnnnnnnnnnnnnnnnnnnnnnnnnnnnnnnnnnnnnnnnnnnnnnnnnnnnnnnnnnnnnnnnnnnnnnnnnnnnnnnnnnnnnnnnnnnnnnnnnnnnnnnnnnnnnnnnnnnnnnnnnnnnnnnnnnnnnnnnnnnnnnnnnnnnnnnnnnnnnnnnnnnnnnnnnnnnnnnnnnnnnnnnnnnnnnnnnnnnnnnnnnnnnnnnnnnnnnnnnnnnnnnnnnnnnnnnnnnnnnnnnnnnnnnnnnnnnnnnnnnnnnnnnnnnnnnnnnnnnnnnnnnnnnnnnnnnnnnnnnnnnnnnnnnnnnnnnnnnnnnnnnnnnnnnnnnnnnnnnnnnnnnnnnnnnnnnnnnnnnnnnnnnnnnnnnnnnnnnnnnnnnnnnnnnnnnnnnnnnnnnnnnnnnnnnnnnnnnnnnnnnnnnnnnnnnnnnnnnnnnnnnnnnnnnnnnnnnnnnnnnnnnnnnnnnnnnnnnnnnnnnnnnnnnnnnnnnnnnnnnnnnnnnnnnnnnnnnnnnnnnnnnnnnnnnnnnnnnnnnnnnnnnnnnnnnnnnnnnnnnnnnnnnnnnnnnnnnnnnnnnnnnnnnnnnnnnnnnnnnnnnnnnnnnnnnnnnnnnnnnnnnnnnnnnnnnnnnnnnnnnnnnnnnnnnnnnnnnnnnnnnnnnnnnnnnnnnnnnnnnnnnnnnnnnnnnnnnnnnnnnnnnnnnnnnnnnnnnnnnnnnnnnnnnnnnnnnnnnnnnnnnnnnnnnnnnnnnnnnnnnnnnnnnnnnnnnnnnnnnnnnnnnnnnnnnnnnnnnnnnnnnnnnnnnnnnnnnnnnnnnnnnnnnnnnnnnnnnnnnnnnnnnnnnnnnnnnnnnnnnnnnnnnnnnnnnnnnnnnnnnnnnnnnnnnnnnnnnnnnnnnnnnnnnnnnnnnnnnnnnnnnnnnnnnnnnnnnnnnnnnnnnnnnnnnnnnnnnnnnnnnnnnnnnnnnnnnnnnnnnnnnnnnnnnnnnnnnnnnnnnnnnnnnnnnnnnnnnnnnnnnnnnnnnnnnnnnnnnnnnnnnnnnnnnnnnnnnnnnnnnnnnnnnnnnnnnnnnnnnnnnnnnnnnnnnnnnnnnnnnnnnnnnnnnnnnnnnnnnnnnnnnnnnnnnnnnnnnnnnnnnnnnnnnnnnnnnnnnnnnnnnnnnnnnnnnnnnnnnnnnnnnnnnnnnnnnnnnnnnnnnnnnnnnnnnnnnnnnnnnnnnnnnnnnnnnnnnnnnnnnnnnnnnnnnnnnnnnnnnnnnnnnnnnnnnnnnnnnnnnnnnnnnnnnnnnnnnnnnnnnnnnnnnnnnnnnnnnnnnnnnnnnnnnnnnnnnnnnnnnnnnnnnnnnnnnnnnnnnnnnnnnnnnnnnnnnnnnnnnnnnnnnnnnnnnnnnnnnnnnnnnnnnnnnnnnnnnnnnnnnnnnnnnnnnnnnnnnnnnnnnnnnnnnnnnnnnnnnnnnnnnnnnnnnnnnnnnnnnnnnnnnnnnnnnnnnnnnnnnnnnnnnnnnnnnnnnnnnnnnnnnnnnnnnnnnnnnnnnnnnnnnnnnnnnnnnnnnnnnnnnnnnnnnnnnnnnnnnnnnnnnnnnnnnnnnnnnnnnnnnnnnnnnnnnnnnnnnnnnnnnnnnnnnnnnnnnnnnnnnnnnnnnnnnnnnnnnnnnnnnnnnnnnnnnnnnnnnnnnnnnnnnnnnnnnnnnnnnnnnnnnnnnnnnnnnnnnnnnnnnnnnnnnnnnnnnnnnnnnnnnnnnnnnnnnnnnnnnnnnnnnnnnnnnnnnnnnnnnnnnnnnnnnnnnnnnnnnnnnnnnnnnnnnnnnnnnnnnnnnnnnnnnnnnnnnnnnnnnnnnnnnnnnnnnnnnnnnnnnnnnnnnnnnnnnnnnnnnnnnnnnnnnnnnnnnnnnnnnnnnnnnnnnnnnnnnnnnnnnnnnnnnnnnnnnnnnnnnnnnnnnnnnnnnnnnnnnnnnnnnnnnnnnnnnnnnnnnnnnnnnnnnnnnnnnnnnnnnnnnnnnnnnnnnnnnnnnnnnnnnnnnnnnnnnnnnnnnnnnnnnnnnnnnnnnnnnnnnnnnnnnnnnnnnnnnnnnnnnnnnnnnnnnnnnnnnnnnnnnnnnnnnnnnnnnnnnnnnnnnnnnnnnnnnnnnnnnnnnnnnnnnnnnnnnnnnnnnnnnnnnnnnnnnnnnnnnnnnnnnnnnnnnnnnnnnnnnnnnnnnnnnnnnnnnnnnnnnnnnnnnnnnnnnnnnnnnnnnnnnnnnnnnnnnnnnnnnnnnnnnnnnnnnnnnnnnnnnnnnnnnnnnnnnnnnnnnnnnnnnnnnnnnnnnnnnnnnnnnnnnnnnnnnnnnnnnnnnnnnnnnnnnnnnnnnnnnnnnnnnnnnnnnnnnnnnnnnnnnnnnnnnnnnnnnnnnnnnnnnnnnnnnnnnnnnnnnnnnnnnnnnnnnnnnnnnnnnnnnnnnnnnnnnnnnnnnnnnnnnnnnnnnnnnnnnnnnnnnnnnnnnnnnnnnnnnnnnnnnnnnnnnnnnnnnnnnnnnnnnnnnnnnnnnnnnnnnnnnnnnnnnnnnnnnnnnnnnnnnnnnnnnnnnnnnnnnnnnnnnnnnnnnnnnnnnnnnnnnnnnnnnnnnnnnnnnnnnnnnnnnnnnnnnnnnnnnnnnnnnnnnnnnnnnnnnnnnnnnnnnnnnnnnnnnnnnnnnnnnnnnnnnnnnnnnnnnnnnnnnnnnnnnnnnnnnnnnnnnnnnnnnnnnnnnnnnnnnnnnnnnnnnnnnnnnnnnnnnnnnnnnnnnnnnnnnnnnnnnnnnnnnnnnnnnnnnnnnnnnnnnnnnnnnnnnnnnnnnnnnnnnnnnnnnnnnnnnnnnnnnnnnnnnnnnnnnnnnnnnnnnnnnnnnnnnnnnnnnnnnnnnnnnnnnnnnnnnnnnnnnnnnnnnnnnnnnnnnnnnnnnnnnnnnnnnnnnnnnnnnnnnnnnnnnnnnnnnnnnnnnnnnnnnnnnnnnnnnnnnnnnnnnnnnnnnnnnnnnnnnnnnnnnnnnnnnnnnnnnnnnnnnnnnnnnnnnnnnnnnnnnnnnnnnnnnnnnnnnnnnnnnnnnnnnnnnnnnnnnnnnnnnnnnnnnnnnnnnnnnnnnnnnnnnnnnnnnnnnnnnnnnnnnnnnnnnnnnnnnnnnnnnnnnnnnnnnnnnnnnnnnnnnnnnnnnnnnnnnnnnnnnnnnnnnnnnnnnnnnnnnnnnnnnnnnnnnnnnnnnnnnnnnnnnnnnnnnnnnnnnnnnnnnnnnnnnnnnnnnnnnnnnnnnnnnnnnnnnnnnnnnnnnnnnnnnnnnnnnnnnnnnnnnnnnnnnnnnnnnnnnnnnnnnnnnnnnnnnnnnnnnnnnnnnnnnnnnnnnnnnnnnnnnnnnnnnnnnnnnnnnnnnnnnnnnnnnnnnnnnnnnnnnnnnnnnnnnnnnnnnnnnnnnnnnnnnnnnnnnnnnnnnnnnnnnnnnnnnnnnnnnnnnnnnnnnnnnnnnnnnnnnnnnnnnnnnnnnnnnnnnnnnnnnnnnnnnnnnnnnnnnnnnnnnnnnnnnnnnnnnnnnnnnnnnnnnnnnnnnnnnnnnnnnnnnnnnnnnnnnnnnnnnnnnnnnnnnnnnnnnnnnnnnnnnnnnnnnnnnnnnnnnnnnnnnnnnnnnnnnnnnnnnnnnnnnnnnnnnnnnnnnnnnnnnnnnnnnnnnnnnnnnnnnnnnnnnnnnnnnnnnnnnnnnnnnnnnnnnnnnnnnnnnnnnnnnnnnnnnnnnnnnnnnnnnnnnnnnnnnnnnnnnnnnnnnnnnnnnnnnnnnnnnnnnnnnnnnnnnnnnnnnnnnnnnnnnnnnnnnnnnnnnnnnnnnnnnnnnnnnnnnnnnnnnnnnnnnnnnnnnnnnnnnnnnnnnnnnnnnnnnnnnnnnnnnnnnnnnnnnnnnnnnnnnnnnnnnnnnnnnnnnnnnnnnnnnnnnnnnnnnnnnnnnnnnnnnnnnnnnnnnnnnnnnnnnnnnnnnnnnnnnnnnnnnnnnnnnnnnnnnnnnnnnnnnnnnnnnnnnnnnnnnnnnnnnnnnnnnnnnnnnnnnnnnnnnnnnnnnnnnnnnnnnnnnnnnnnnnnnnnnnnnnnnnnnnnnnnnnnnnnnnnnnnnnnnnnnnnnnnnnnnnnnnnnnnnnnnnnnnnnnnnnnnnnnnnnnnnnnnnnnnnnnnnnnnnnnnnnnnnnnnnnnnnnnnnnnnnnnnnnnnnnnnnnnnnnnnnnnnnnnnnnnnnnnnnnnnnnnnnnnnnnnnnnnnnnnnnnnnnnnnnnnnnnnnnnnnnnnnnnnnnnnnnnnnnnnnnnnnnnnnnnnnnnnnnnnnnnnnnnnnnnnnnnnnnnnnnnnnnnnnnnnnnnnnnnnnnnnnnnnnnnnnnnnnnnnnnnnnnnnnnnnnnnnnnnnnnnnnnnnnnnnnnnnnnnnnnnnnnnnnnnnnnnnnnnnnnnnnnnnnnnnnnnnnnnnnnnnnnnnnnnnnnnnnnnnnnnnnnnnnnnnnnnnnnnnnnnnnnnnnnnnnnnnnnnnnnnnnnnnnnnnnnnnnnnnnnnnnnnnnnnnnnnnnnnnnnnnnnnnnnnnnnnnnnnnnnnnnnnnnnnnnnnnnnnnnnnnnnnnnnnnnnnnnnnnnnnnnnnnnnnnnnnnnnnnnnnnnnnnnnnnnnnnnnnnnnnnnnnnnnnnnnnnnnnnnnnnnnnnnnnnnnnnnnnnnnnnnnnnnnnnnnnnnnnnnnnnnnnnnnnnnnnnnnnnnnnnnnnnnnnnnnnnnnnnnnnnnnnnnnnnnnnnnnnnnnnnnnnnnnnnnnnnnnnnnnnnnnnnnnnnnnnnnnnnnnnnnnnnnnnnnnnnnnnnnnnnnnnnnnnnnnnnnnnnnnnnnnnnnnnnnnnnnnnnnnnnnnnnnnnnnnnnnnnnnnnnnnnnnnnnnnnnnnnnnnnnnnnnnnnnnnnnnnnnnnnnnnnnnnnnnnnnnnnnnnnnnnnnnnnnnnnnnnnnnnnnnnnnnnnnnnnnnnnnnnnnnnnnnnnnnnnnnnnnnnnnnnnnnnnnnnnnnnnnnnnnnnnnnnnnnnnnnnnnnnnnnnnnnnnnnnnnnnnnnnnnnnnnnnnnnnnnnnnnnnnnnnnnnnnnnnnnnnnnnnnnnnnnnnnnnnnnnnnnnnnnnnnnnnnnnnnnnnnnnnnnnnnnnnnnnnnnnnnnnnnnnnnnnnnnnnnnnnnnnnnnnnnnnnnnnnnnnnnnnnnnnnnnnnnnnnnnnnnnnnnnnnnnnnnnnnnnnnnnnnnnnnnnnnnnnnnnnnnnnnnnnnnnnnnnnnnnnnnnnnnnnnnnnnnnnnnnnnnnnnnnnnnnnnnnnnnnnnnnnnnnnnnnnnnnnnnnnnnnnnnnnnnnnnnnnnnnnnnnnnnnnnnnnnnnnnnnnnnnnnnnnnnnnnnnnnnnnnnnnnnnnnnnnnnnnnnnnnnnnnnnnnnnnnnnnnnnnnnnnnnnnnnnnnnnnnnnnnnnnnnnnnnnnnnnnnnnnnnnnnnnnnnnnnnnnnnnnnnnnnnnnnnnnnnnnnnnnnnnnnnnnnnnnnnnnnnnnnnnnnnnnnnnnnnnnnnnnnnnnnnnnnnnnnnnnnnnnnnnnnnnnnnnnnnnnnnnnnnnnnnnnnnnnnnnnnnnnnnnnnnnnnnnnnnnnnnnnnnnnnnnnnnnnnnnnnnnnnnnnnnnnnnnnnnnnnnnnnnnnnnnnnnnnnnnnnnnnnnnnnnnnnnnnnnnnnnnnnnnnnnnnnnnnnnnnnnnnnnnnnnnnnnnnnnnnnnnnnnnnnnnnnnnnnnnnnnnnnnnnnnnnnnnnnnnnnnnnnnnnnnnnnnnnnnnnnnnnnnnnnnnnnnnnnnnnnnnnnnnnnnnnnnnnnnnnnnnnnnnnnnnnnnnnnnnnnnnnnnnnnnnnnnnnnnnnnnnnnnnnnnnnnnnnnnnnnnnnnnnnnnnnnnnnnnnnnnnnnnnnnnnnnnnnnnnnnnnnnnnnnnnnnnnnnnnnnnnnnnnnnnnnnnnnnnnnnnnnnnnnnnnnnnnnnnnnnnnnnnnnnnnnnnnnnnnnnnnnnnnnnnnnnnnnnnnnnnnnnnnnnnnnnnnnnnnnnnnnnnnnnnnnnnnnnnnnnnnnnnnnnnnnnnnnnnnnnnnnnnnnnnnnnnnnnnnnnnnnnnnnnnnnnnnnnnnnnnnnnnnnnnnnnnnnnnnnnnnnnnnnnnnnnnnnnnnnnnnnnnnnnnnnnnnnnnnnnnnnnnnnnnnnnnnnnnnnnnnnnnnnnnnnnnnnnnnnnnnnnnnnnnnnnnnnnnnnnnnnnnnnnnnnnnnnnnnnnnnnnnnnnnnnnnnnnnnnnnnnnnnnnnnnnnnnnnnnnnnnnnnnnnnnnnnnnnnnnnnnnnnnnnnnnnnnnnnnnnnnnnnnnnnnnnnnnnnnnnnnnnnnnnnnnnnnnnnnnnnnnnnnnnnnnnnnnnnnnnnnnnnnnnnnnnnnnnnnnnnnnnnnnnnnnnnnnnnnnnnnnnnnnnnnnnnnnnnnnnnnnnnnnnnnnnnnnnnnnnnnnnnnnnnnnnnnnnnnnnnnnnnnnnnnnnnnnnnnnnnnnnnnnnnnnnnnnnnnnnnnnnnnnnnnnnnnnnnnnnnnnnnnnnnnnnnnnnnnnnnnnnnnnnnnnnnnnnnnnnnnnnnnnnnnnnnnnnnnnnnnnnnnnnnnnnnnnnnnnnnnnnnnnnnnnnnnnnnnnnnnnnnnnnnnnnnnnnnnnnnnnnnnnnnnnnnnnnnnnnnnnnnnnnnnnnnnnnnnnnnnnnnnnnnnnnnnnnnnnnnnnnnnnnnnnnnnnnnnnnnnnnnnnnnnnnnnnnnnnnnnnnnnnnnnnnnnnnnnnnnnnnnnnnnnnnnnnnnnnnnnnnnnnnnnnnnnnnnnnnnnnnnnnnnnnnnnnnnnnnnnnnnnnnnnnnnnnnnnnnnnnnnnnnnnnnnnnnnnnnnnnnnnnnnnnnnnnnnnnnnnnnnnnnnnnnnnnnnnnnnnnnnnnnnnnnnnnnnnnnnnnnnnnnnnnnnnnnnnnnnnnnnnnnnnnnnnnnnnnnnnnnnnnnnnnnnnnnnnnnnnnnnnnnnnnnnnnnnnnnnnnnnnnnnnnnnnnnnnnnnnnnnnnnnnnnnnnnnnnnnnnnnnnnnnnnnnnnnnnnnnnnnnnnnnnnnnnnnnnnnnnnnnnnnnnnnnnnnnnnnnnnnnnnnnnnnnnnnnnnnnnnnnnnnnnnnnnnnnnnnnnnnnnnnnnnnnnnnnnnnnnnnnnnnnnnnnnnnnnnnnnnnnnnnnnnnnnnnnnnnnnnnnnnnnnnnnnnnnnnnnnnnnnnnnnnnnnnnnnnnnnnnnnnnnnnnnnnnnnnnnnnnnnnnnnnnnnnnnnnnnnnnnnnnnnnnnnnnnnnnnnnnnnnnnnnnnnnnnnnnnnnnnnnnnnnnnnnnnnnnnnnnnnnnnnnnnnnnnnnnnnnnnnnnnnnnnnnnnnnnnnnnnnnnnnnnnnnnnnnnnnnnnnnnnnnnnnnnnnnnnnnnnnnnnnnnnnnnnnnnnnnnnnnnnnnnnnnnnnnnnnnnnnnnnnnnnnnnnnnnnnnnnnnnnnnnnnnnnnnnnnnnnnnnnnnnnnnnnnnnnnnnnnnnnnnnnnnnnnnnnnnnnnnnnnnnnnnnnnnnnnnnnnnnnnnnnnnnnnnnnnnnnnnnnnnnnnnnnnnnnnnnnnnnnnnnnnnnnnnnnnnnnnnnnnnnnnnnnnnnnnnnnnnnnnnnnnnnnnnnnnnnnnnnnnnnnnnnnnnnnnnnnnnnnnnnnnnnnnnnnnnnnnnnnnnnnnnnnnnnnnnnnnnnnnnnnnnnnnnnnnnnnnnnnnnnnnnnnnnnnnnnnnnnnnnnnnnnnnnnnnnnnnnnnnnnnnnnnnnnnnnnnnnnnnnnnnnnnnnnnnnnnnnnnnnnnnnnnnnnnnnnnnnnnnnnnnnnnnnnnnnnnnnnnnnnnnnnnnnnnnnnnnnnnnnnnnnnnnnnnnnnnnnnnnnnnnnnnnnnnnnnnnnnnnnnnnnnnnnnnnnnnnnnnnnnnnnnnnnnnnnnnnnnnnnnnnnnnnnnnnnnnnnnnnnnnnnnnnnnnnnnnnnnnnnnnnnnnnnnnnnnnnnnnnnnnnnnnnnnnnnnnnnnnnnnnnnnnnnnnnnnnnnnnnnnnnnnnnnnnnnnnnnnnnnnnnnnnnnnnnnnnnnnnnnnnnnnnnnnnnnnnnnnnnnnnnnnnnnnnnnnnnnnnnnnnnnnnnnnnnnnnnnnnnnnnnnnnnnnnnnnnnnnnnnnnnnnnnnnnnnnnnnnnnnnnnnnnnnnnnnnnnnnnnnnnnnnnnnnnnnnnnnnnnnnnnnnnnnnnnnnnnnnnnnnnnnnnnnnnnnnnnnnnnnnnnnnnnnnnnnnnnnnnnnnnnnnnnnnnnnnnnnnnnnnnnnnnnnnnnnnnnnnnnnnnnnnnnnnnnnnnnnnnnnnnnnnnnnnnnnnnnnnnnnnnnnnnnnnnnnnnnnnnnnnnnnnnnnnnnnnnnnnnnnnnnnnnnnnnnnnnnnnnnnnnnnnnnnnnnnnnnnnnnnnnnnnnnnnnnnnnnnnnnnnnnnnnnnnnnnnnnnnnnnnnnnnnnnnnnnnnnnnnnnnnnnnnnnnnnnnnnnnnnnnnnnnnnnnnnnnnnnnnnnnnnnnnnnnnnnnnnnnnnnnnnnnnnnnnnnnnnnnnnnnnnnnnnnnnnnnnnnnnnnnnnnnnnnnnnnnnnnnnnnnnnnnnnnnnnnnnnnnnnnnnnnnnnnnnnnnnnnnnnnnnnnnnnnnnnnnnnnnnnnnnnnnnnnnnnnnnnnnnnnnnnnnnnnnnnnnnnnnnnnnnnnnnnnnnnnnnnnnnnnnnnnnnnnnnnnnnnnnnnnnnnnnnnnnnnnnnnnnnnnnnnnnnnnnnnnnnnnnnnnnnnnnnnnnnnnnnnnnnnnnnnnnnnnnnnnnnnnnnnnnnnnnnnnnnnnnnnnnnnnnnnnnnnnnnnnnnnnnnnnnnnnnnnnnnnnnnnnnnnnnnnnnnnnnnnnnnnnnnnnnnnnnnnnnnnnnnnnnnnnnnnnnnnnnnnnnnnnnnnnnnnnnnnnnnnnnnnnnnnnnnnnnnnnnnnnnnnnnnnnnnnnnnnnnnnnnnnnnnnnnnnnnnnnnnnnnnnnnnnnnnnnnnnnnnnnnnnnnnnnnnnnnnnnnnnnnnnnnnnnnnnnnnnnnnnnnnnnnnnnnnnnnnnnnnnnnnnnnnnnnnnnnnnnnnnnnnnnnnnnnnnnnnnnnnnnnnnnnnnnnnnnnnnnnnnnnnnnnnnnnnnnnnnnnnnnnnnnnnnnnnnnnnnnnnnnnnnnnnnnnnnnnnnnnnnnnnnnnnnnnnnnnnnnnnnnnnnnnnnnnnnnnnnnnnnnnnnnnnnnnnnnnnnnnnnnnnnnnnnnnnnnnnnnnnnnnnnnnnnnnnnnnnnnnnnnnnnnnnnnnnnnnnnnnnnnnnnnnnnnnnnnnnnnnnnnnnnnnnnnnnnnnnnnnnnnnnnnnnnnnnnnnnnnnnnnnnnnnnnnnnnnnnnnnnnnnnnnnnnnnnnnnnnnnnnnnnnnnnnnnnnnnnnnnnnnnnnnnnnnnnnnnnnnnnnnnnnnnnnnnnnnnnnnnnnnnnnnnnnnnnnnnnnnnnnnnnnnnnnnnnnnnnnnnnnnnnnnnnnnnnnnnnnnnnnnnnnnnnnnnnnnnnnnnnnnnnnnnnnnnnnnnnnnnnnnnnnnnnnnnnnnnnnnnnnnnnnnnnnnnnnnnnnnnnnnnnnnnnnnnnnnnnnnnnnnnnnnnnnnnnnnnnnnnnnnnnnnnnnnnnnnnnnnnnnnnnnnnnnnnnnnnnnnnnnnnnnnnnnnnnnnnnnnnnnnnnnnnnnnnnnnnnnnnnnnnnnnnnnnnnnnnnnnnnnnnnnnnnnnnnnnnnnnnnnnnnnnnnnnnnnnnnnnnnnnnnnnnnnnnnnnnnnnnnnnnnnnnnnnnnnnnnnnnnnnnnnnnnnnnnnnnnnnnnnnnnnnnnnnnnnnnnnnnnnnnnnnnnnnnnnnnnnnnnnnnnnnnnnnnnnnnnnnnnnnnnnnnnnnnnnnnnnnnnnnnnnnnnnnnnnnnnnnnnnnnnnnnnnnnnnnnnnnnnnnnnnnnnnnnnnnnnnnnnnnnnnnnnnnnnnnnnnnnnnnnnnnnnnnnnnnnnnnnnnnnnnnnnnnnnnnnnnnnnnnnnnnnnnnnnnnnnnnnnnnnnnnnnnnnnnnnnnnnnnnnnnnnnnnnnnnnnnnnnnnnnnnnnnnnnnnnnnnnnnnnnnnnnnnnnnnnnnnnnnnnnnnnnnnnnnnnnnnnnnnnnnnnnnnnnnnnnnnnnnnnnnnnnnnnnnnnnnnnnnnnnnnnnnnnnnnnnnnnnnnnnnnnnnnnnnnnnnnnnnnnnnnnnnnnnnnnnnnnnnnnnnnnnnnnnnnnnnnnnnnnnnnnnnnnnnnnnnnnnnnnnnnnnnnnnnnnnnnnnnnnnnnnnnnnnnnnnnnnnnnnnnnnnnnnnnnnnnnnnnnnnnnnnnnnnnnnnnnnnnnnnnnnnnnnnnnnnnnnnnnnnnnnnnnnnnnnnnnnnnnnnnnnnnnnnnnnnnnnnnnnnnnnnnnnnnnnnnnnnnnnnnnnnnnnnnnnnnnnnnnnnnnnnnnnnnnnnnnnnnnnnnnnnnnnnnnnnnnnnnnnnnnnnnnnnnnnnnnnnnnnnnnnnnnnnnnnnnnnnnnnnnnnnnnnnnnnnnnnnnnnnnnnnnnnnnnnnnnnnnnnnnnnnnnnnnnnnnnnnnnnnnnnnnnnnnnnnnnnnnnnnnnnnnnnnnnnnnnnnnnnnnnnnnnnnnnnnnnnnnnnnnnnnnnnnnnnnnnnnnnnnnnnnnnnnnnnnnnnnnnnnnnnnnnnnnnnnnnnnnnnnnnnnnnnnnnnnnnnnnnnnnnnnnnnnnnnnnnnnnnnnnnnnnnnnnnnnnnnnnnnnnnnnnnnnnnnnnnnnnnnnnnnnnnnnnnnnnnnnnnnnnnnnnnnnnnnnnnnnnnnnnnnnnnnnnnnnnnnnnnnnnnnnnnnnnnnnnnnnnnnnnnnnnnnnnnnnnnnnnnnnnnnnnnnnnnnnnnnnnnnnnnnnnnnnnnnnnnnnnnnnnnnnnnnnnnnnnnnnnnnnnnnnnnnnnnnnnnnnnnnnnnnnnnnnnnnnnnnnnnnnnnnnnnnnnnnnnnnnnnnnnnnnnnnnnnnnnnnnnnnnnnnnnnnnnnnnnnnnnnnnnnnnnnnnnnnnnnnnnnnnnnnnnnnnnnnnnnnnnnnnnnnnnnnnnnnnnnnnnnnnnnnnnnnnnnnnnnnnnnnnnnnnnnnnnnnnnnnnnnnnnnnnnnnnnnnnnnnnnnnnnnnnnnnnnnnnnnnnnnnnnnnnnnnnnnnnnnnnnnnnnnnnnnnnnnnnnnnnnnnnnnnnnnnnnnnnnnnnnnnnnnnnnnnnnnnnnnnnnnnnnnnnnnnnnnnnnnnnnnnnnnnnnnnnnnnnnnnnnnnnnnnnnnnnnnnnnnnnnnnnnnnnnnnnnnnnnnnnnnnnnnnnnnnnnnnnnnnnnnnnnnnnnnnnnnnnnnnnnnnnnnnnnnnnnnnnnnnnnnnnnnnnnnnnnnnnnnnnnnnnnnnnnnnnnnnnnnnnnnnnnnnnnnnnnnnnnnnnnnnnnnnnnnnnnnnnnnnnnnnnnnnnnnnnnnnnnnnnnnnnnnnnnnnnnnnnnnnnnnnnnnnnnnnnnnnnnnnnnnnnnnnnnnnnnnnnnnnnnnnnnnnnnnnnnnnnnnnnnnnnnnnnnnnnnnnnnnnnnnnnnnnnnnnnnnnnnnnnnnnnnnnnnnnnnnnnnnnnnnnnnnnnnnnnnnnnnnnnnnnnnnnnnnnnnnnnnnnnnnnnnnnnnnnnnnnnnnnnnnnnnnnnnnnnnnnnnnnnnnnnnnnnnnnnnnnnnnnnnnnnnnnnnnnnnnnnnnnnnnnnnnnnnnnnnnnnnnnnnnnnnnnnnnnnnnnnnnnnnnnnnnnnnnnnnnnnnnnnnnnnnnnnnnnnnnnnnnnnnnnnnnnnnnnnnnnnnnnnnnnnnnnnnnnnnnnnnnnnnnnnnnnnnnnnnnnnnnnnnnnnnnnnnnnnnnnnnnnnnnnnnnnnnnnnnnnnnnnnnnnnnnnnnnnnnnnnnnnnnnnnnnnnnnnnnnnnnnnnnnnnnnnnnnnnnnnnnnnnnnnnnnnnnnnnnnnnnnnnnnnnnnnnnnnnnnnnnnnnnnnnnnnnnnnnnnnnnnnnnnnnnnnnnnnnnnnnnnnnnnnnnnnnnnnnnnnnnnnnnnnnnnnnnnnnnnnnnnnnnnnnnnnnnnnnnnnnnnnnnnnnnnnnnnnnnnnnnnnnnnnnnnnnnnnnnnnnnnnnnnnnnnnnnnnnnnnnnnnnnnnnnnnnnnnnnnnnnnnnnnnnnnnnnnnnnnnnnnnnnnnnnnnnnnnnnnnnnnnnnnnnnnnnnnnnnnnnnnnnnnnnnnnnnnnnnnnnnnnnnnnnnnnnnnnnnnnnnnnnnnnnnnnnnnnnnnnnnnnnnnnnnnnnnnnnnnnnnnnnnnnnnnnnnnnnnnnnnnnnnnnnnnnnnnnnnnnnnnnnnnnnnnnnnnnnnnnnnnnnnnnnnnnnnnnnnnnnnnnnnnnnnnnnnnnnnnnnnnnnnnnnnnnnnnnnnnnnnnnnnnnnnnnnnnnnnnnnnnnnnnnnnnnnnnnnnnnnnnnnnnnnnnnnnnnnnnnnnnnnnnnnnnnnnnnnnnnnnnnnnnnnnnnnnnnnnnnnnnnnnnnnnnnnnnnnnnnnnnnnnnnnnnnnnnnnnnnnnnnnnnnnnnnnnnnnnnnnnnnnnnnnnnnnnnnnnnnnnnnnnnnnnnnnnnnnnnnnnnnnnnnnnnnnnnnnnnnnnnnnnnnnnnnnnnnnnnnnnnnnnnnnnnnnnnnnnnnnnnnnnnnnnnnnnnnnnnnnnnnnnnnnnnnnnnnnnnnnnnnnnnnnnnnnnnnnnnnnnnnnnnnnnnnnnnnnnnnnnnnnnnnnnnnnnnnnnnnnnnnnnnnnnnnnnnnnnnnnnnnnnnnnnnnnnnnnnnnnnnnnnnnnnnnnnnnnnnnnnnnnnnnnnnnnnnnnnnnnnnnnnnnnnnnnnnnnnnnnnnnnnnnnnnnnnnnnnnnnnnnnnnnnnnnnnnnnnnnnnnnnnnnnnnnnnnnnnnnnnnnnnnnnnnnnnnnnnnnnnnnnnnnnnnnnnnnnnnnnnnnnnnnnnnnnnnnnnnnnnnnnnnnnnnnnnnnnnnnnnnnnnnnnnnnnnnnnnnnnnnnnnnnnnnnnnnnnnnnnnnnnnnnnnnnnnnnnnnnnnnnnnnnnnnnnnnnnnnnnnnnnnnnnnnnnnnnnnnnnnnnnnnnnnnnnnnnnnnnnnnnnnnnnnnnnnnnnnnnnnnnnnnnnnnnnnnnnnnnnnnnnnnnnnnnnnnnnnnnnnnnnnnnnnnnnnnnnnnnnnnnnnnnnnnnnnnnnnnnnnnnnnnnnnnnnnnnnnnnnnnnnnnnnnnnnnnnnnnnnnnnnnnnnnnnnnnnnnnnnnnnnnnnnnnnnnnnnnnnnnnnnnnnnnnnnnnnnnnnnnnnnnnnnnnnnnnnnnnnnnnnnnnnnnnnnnnnnnnnnnnnnnnnnnnnnnnnnnnnnnnnnnnnnnnnnnnnnnnnnnnnnnnnnnnnnnnnnnnnnnnnnnnnnnnnnnnnnnnnnnnnnnnnnnnnnnnnnnnnnnnnnnnnnnnnnnnnnnnnnnnnnnnnnnnnnnnnnnnnnnnnnnnnnnnnnnnnnnnnnnnnnnnnnnnnnnnnnnnnnnnnnnnnnnnnnnnnnnnnnnnnnnnnnnnnnnnnnnnnnnnnnnnnnnnnnnnnnnnnnnnnnnnnnnnnnnnnnnnnnnnnnnnnnnnnnnnnnnnnnnnnnnnnnnnnnnnnnnnnnnnnnnnnnnnnnnnnnnnnnnnnnnnnnnnnnnnnnnnnnnnnnnnnnnnnnnnnnnnnnnnnnnnnnnnnnnnnnnnnnnnnnnnnnnnnnnnnnnnnnnnnnnnnnnnnnnnnnnnnnnnnnnnnnnnnnnnnnnnnnnnnnnnnnnnnnnnnnnnnnnnnnnnnnnnnnnnnnnnnnnnnnnnnnnnnnnnnnnnnnnnnnnnnnnnnnnnnnnnnnnnnnnnnnnnnnnnnnnnnnnnnnnnnnnnnnnnnnnnnnnnnnnnnnnnnnnnnnnnnnnnnnnnnnnnnnnnnnnnnnnnnnnnnnnnnnnnnnnnnnnnnnnnnnnnnnnnnnnnnnnnnnnnnnnnnnnnnnnnnnnnnnnnnnnnnnnnnnnnnnnnnnnnnnnnnnnnnnnnnnnnnnnnnnnnnnnnnnnnnnnnnnnnnnnnnnnnnnnnnnnnnnnnnnnnnnnnnnnnnnnnnnnnnnnnnnnnnnnnnnnnnnnnnnnnnnnnnnnnnnnnnnnnnnnnnnnnnnnnnnnnnnnnnnnnnnnnnnnnnnnnnnnnnnnnnnnnnnnnnnnnnnnnnnnnnnnnnnnnnnnnnnnnnnnnnnnnnnnnnnnnnnnnnnnnnnnnnnnnnnnnnnnnnnnnnnnnnnnnnnnnnnnnnnnnnnnnnnnnnnnnnnnnnnnnnnnnnnnnnnnnnnnnnnnnnnnnnnnnnnnnnnnnnnnnnnnnnnnnnnnnnnnnnnnnnnnnnnnnnnnnnnnnnnnnnnnnnnnnnnnnnnnnnnnnnnnnnnnnnnnnnnnnnnnnnnnnnnnnnnnnnnnnnnnnnnnnnnnnnnnnnnnnnnnnnnnnnnnnnnnnnnnnnnnnnnnnnnnnnnnnnnnnnnnnnnnnnnnnnnnnnnnnnnnnnnnnnnnnnnnnnnnnnnnnnnnnnnnnnnnnnnnnnnnnnnnnnnnnnnnnnnnnnnnnnnnnnnnnnnnnnnnnnnnnnnnnnnnnnnnnnnnnnnnnnnnnnnnnnnnnnnnnnnnnnnnnnnnnnnnnnnnnnnnnnnnnnnnnnnnnnnnnnnnnnnnnnnnnnnnnnnnnnnnnnnnnnnnnnnnnnnnnnnnnnnnnnnnnnnnnnnnnnnnnnnnnnnnnnnnnnnnnnnnnnnnnnnnnnnnnnnnnnnnnnnnnnnnnnnnnnnnnnnnnnnnnnnnnnnnnnnnnnnnnnnnnnnnnnnnnnnnnnnnnnnnnnnnnnnnnnnnnnnnnnnnnnnnnnnnnnnnnnnnnnnnnnnnnnnnnnnnnnnnnnnnnnnnnnnnnnnnnnnnnnnnnnnnnnnnnnnnnnnnnnnnnnnnnnnnnnnnnnnnnnnnnnnnnnnnnnnnnnnnnnnnnnnnnnnnnnnnnnnnnnnnnnnnnnnnnnnnnnnnnnnnnnnnnnnnnnnnnnnnnnnnnnnnnnnnnnnnnnnnnnnnnnnnnnnnnnnnnnnnnnnnnnnnnnnnnnnnnnnnnnnnnnnnnnnnnnnnnnnnnnnnnnnnnnnnnnnnnnnnnnnnnnnnnnnnnnnnnnnnnnnnnnnnnnnnnnnnnnnnnnnnnnnnnnnnnnnnnnnnnnnnnnnnnnnnnnnnnnnnnnnnnnnnnnnnnnnnnnnnnnnnnnnnnnnnnnnnnnnnnnnnnnnnnnnnnnnnnnnnnnnnnnnnnnnnnnnnnnnnnnnnnnnnnnnnnnnnnnnnnnnnnnnnnnnnnnnnnnnnnnnnnnnnnnnnnnnnnnnnnnnnnnnnnnnnnnnnnnnnnnnnnnnnnnnnnnnnnnnnnnnnnnnnnnnnnnnnnnnnnnnnnnnnnnnnnnnnnnnnnnnnnnnnnnnnnnnnnnnnnnnnnnnnnnnnnnnnnnnnnnnnnnnnnnnnnnnnnnnnnnnnnnnnnnnnnnnnnnnnnnnnnnnnnnnnnnnnnnnnnnnnnnnnnnnnnnnnnnnnnnnnnnnnnnnnnnnnnnnnnnnnnnnnnnnnnnnnnnnnnnnnnnnnnnnnnnnnnnnnnnnnnnnnnnnnnnnnnnnnnnnnnnnnnnnnnnnnnnnnnnnnnnnnnnnnnnnnnnnnnnnnnnnnnnnnnnnnnnnnnnnnnnnnnnnnnnnnnnnnnnnnnnnnnnnnnnnnnnnnnnnnnnnnnnnnnnnnnnnnnnnnnnnnnnnnnnnnnnnnnnnnnnnnnnnnnnnnnnnnnnnnnnnnnnnnnnnnnnnnnnnnnnnnnnnnnnnnnnnnnnnnnnnnnnnnnnnnnnnnnnnnnnnnnnnnnnnnnnnnnnnnnnnnnnnnnnnnnnnnnnnnnnnnnnnnnnnnnnnnnnnnnnnnnnnnnnnnnnnnnnnnnnnnnnnnnnnnnnnnnnnnnnnnnnnnnnnnnnnnnnnnnnnnnnnnnnnnnnnnnnnnnnnnnnnnnnnnnnnnnnnnnnnnnnnnnnnnnnnnnnnnnnnnnnnnnnnnnnnnnnnnnnnnnnnnnnnnnnnnnnnnnnnnnnnnnnnnnnnnnnnnnnnnnnnnnnnnnnnnnnnnnnnnnnnnnnnnnnnnnnnnnnnnnnnnnnnnnnnnnnnnnnnnnnnnnnnnnnnnnnnnnnnnnnnnnnnnnnnnnnnnnnnnnnnnnnnnnnnnnnnnnnnnnnnnnnnnnnnnnnnnnnnnnnnnnnnnnnnnnnnnnnnnnnnnnnnnnnnnnnnnnnnnnnnnnnnnnnnnnnnnnnnnnnnnnnnnnnnnnnnnnnnnnnnnnnnnnnnnnnnnnnnnnnnnnnnnnnnnnnnnnnnnnnnnnnnnnnnnnnnnnnnnnnnnnnnnnnnnnnnnnnnnnnnnnnnnnnnnnnnnnnnnnnnnnnnnnnnnnnnnnnnnnnnnnnnnnnnnnnnnnnnnnnnnnnnnnnnnnnnnnnnnnnnnnnnnnnnnnnnnnnnnnnnnnnnnnnnnnnnnnnnnnnnnnnnnnnnnnnnnnnnnnnnnnnnnnnnnnnnnnnnnnnnnnnnnnnnnnnnnnnnnnnnnnnnnnnnnnnnnnnnnnnnnnnnnnnnnnnnnnnnnnnnnnnnnnnnnnnnnnnnnnnnnnnnnnnnnnnnnnnnnnnnnnnnnnnnnnnnnnnnnnnnnnnnnnnnnnnnnnnnnnnnnnnnnnnnnnnnnnnnnnnnnnnnnnnnnnnnnnnnnnnnnnnnnnnnnnnnnnnnnnnnnnnnnnnnnnnnnnnnnnnnnnnnnnnnnnnnnnnnnnnnnnnnnnnnnnnnnnnnnnnnnnnnnnnnnnnnnnnnnnnnnnnnnnnnnnnnnnnnnnnnnnnnnnnnnnnnnnnnnnnnnnnnnnnnnnnnnnnnnnnnnnnnnnnnnnnnnnnnnnnnnnnnnnnnnnnnnnnnnnnnnnnnnnnnnnnnnnnnnnnnnnnnnnnnnnnnnnnnnnnnnnnnnnnnnnnnnnnnnnnnnnnnnnnnnnnnnnnnnnnnnnnnnnnnnnnnnnnnnnnnnnnnnnnnnnnnnnnnnnnnnnnnnnnnnnnnnnnnnnnnnnnnnnnnnnnnnnnnnnnnnnnnnnnnnnnnnnnnnnnnnnnnnnnnnnnnnnnnnnnnnnnnnnnnnnnnnnnnnnnnnnnnnnnnnnnnnnnnnnnnnnnnnnnnnnnnnnnnnnnnnnnnnnnnnnnnnnnnnnnnnnnnnnnnnnnnnnnnnnnnnnnnnnnnnnnnnnnnnnnnnnnnnnnnnnnnnnnnnnnnnnnnnnnnnnnnnnnnnnnnnnnnnnnnnnnnnnnnnnnnnnnnnnnnnnnnnnnnnnnnnnnnnnnnnnnnnnnnnnnnnnnnnnnnnnnnnnnnnnnnnnnnnnnnnnnnnnnnnnnnnnnnnnnnnnnnnnnnnnnnnnnnnnnnnnnnnnnnnnnnnnnnnnnnnnnnnnnnnnnnnnnnnnnnnnnnnnnnnnnnnnnnnnnnnnnnnnnnnnnnnnnnnnnnnnnnnnnnnnnnnnnnnnnnnnnnnnnnnnnnnnnnnnnnnnnnnnnnnnnnnnnnnnnnnnnnnnnnnnnnnnnnnnnnnnnnnnnnnnnnnnnnnnnnnnnnnnnnnnnnnnnnnnnnnnnnnnnnnnnnnnnnnnnnnnnnnnnnnnnnnnnnnnnnnnnnnnnnnnnnnnnnnnnnnnnnnnnnnnnnnnnnnnnnnnnnnnnnnnnnnnnnnnnnnnnnnnnnnnnnnnnnnnnnnnnnnnnnnnnnnnnnnnnnnnnnnnnnnnnnnnnnnnnnnnnnnnnnnnnnnnnnnnnnnnnnnnnnnnnnnnnnnnnnnnnnnnnnnnnnnnnnnnnnnnnnnnnnnnnnnnnnnnnnnnnnnnnnnnnnnnnnnnnnnnnnnnnnnnnnnnnnnnnnnnnnnnnnnnnnnnnnnnnnnnnnnnnnnnnnnnnnnnnnnnnnnnnnnnnnnnnnnnnnnnnnnnnnnnnnnnnnnnnnnnnnnnnnnnnnnnnnnnnnnnnnnnnnnnnnnnnnnnnnnnnnnnnnnnnnnnnnnnnnnnnnnnnnnnnnnnnnnnnnnnnnnnnnnnnnnnnnnnnnnnnnnnnnnnnnnnnnnnnnnnnnnnnnnnnnnnnnnnnnnnnnnnnnnnnnnnnnnnnnnnnnnnnnnnnnnnnnnnnnnnnnnnnnnnnnnnnnnnnnnnnnnnnnnnnnnnnnnnnnnnnnnnnnnnnnnnnnnnnnnnnnnnnnnnnnnnnnnnnnnnnnnnnnnnnnnnnnnnnnnnnnnnnnnnnnnnnnnnnnnnnnnnnnnnnnnnnnnnnnnnnnnnnnnnnnnnnnnnnnnnnnnnnnnnnnnnnnnnnnnnnnnnnnnnnnnnnnnnnnnnnnnnnnnnnnnnnnnnnnnnnnnnnnnnnnnnnnnnnnnnnnnnnnnnnnnnnnnnnnnnnnnnnnnnnnnnnnnnnnnnnnnnnnnnnnnnnnnnnnnnnnnnnnnnnnnnnnnnnnnnnnnnnnnnnnnnnnnnnnnnnnnnnnnnnnnnnnnnnnnnnnnnnnnnnnnnnnnnnnnnnnnnnnnnnnnnnnnnnnnnnnnnnnnnnnnnnnnnnnnnnnnnnnnnnnnnnnnnnnnnnnnnnnnnnnnnnnnnnnnnnnnnnnnnnnnnnnnnnnnnnnnnnnnnnnnnnnnnnnnnnnnnnnnnnnnnnnnnnnnnnnnnnnnnnnnnnnnnnnnnnnnnnnnnnnnnnnnnnnnnnnnnnnnnnnnnnnnnnnnnnnnnnnnnnnnnnnnnnnnnnnnnnnnnnnnnnnnnnnnnnnnnnnnnnnnnnnnnnnnnnnnnnnnnnnnnnnnnnnnnnnnnnnnnnnnnnnnnnnnnnnnnnnnnnnnnnnnnnnnnnnnnnnnnnnnnnnnnnnnnnnnnnnnnnnnnnnnnnnnnnnnnnnnnnnnnnnnnnnnnnnnnnnnnnnnnnnnnnnnnnnnnnnnnnnnnnnnnnnnnnnnnnnnnnnnnnnnnnnnnnnnnnnnnnnnnnnnnnnnnnnnnnnnnnnnnnnnnnnnnnnnnnnnnnnnnnnnnnnnnnnnnnnnnnnnnnnnnnnnnnnnnnnnnnnnnnnnnnnnnnnnnnnnnnnnnnnnnnnnnnnnnnnnnnnnnnnnnnnnnnnnnnnnnnnnnnnnnnnnnnnnnnnnnnnnnnnnnnnnnnnnnnnnnnnnnnnnnnnnnnnnnnnnnnnnnnnnnnnnnnnnnnnnnnnnnnnnnnnnnnnnnnnnnnnnnnnnnnnnnnnnnnnnnnnnnnnnnnnnnnnnnnnnnnnnnnnnnnnnnnnnnnnnnnnnnnnnnnnnnnnnnnnnnnnnnnnnnnnnnnnnnnnnnnnnnnnnnnnnnnnnnnnnnnnnnnnnnnnnnnnnnnnnnnnnnnnnnnnnnnnnnnnnnnnnnnnnnnnnnnnnnnnnnnnnnnnnnnnnnnnnnnnnnnnnnnnnnnnnnnnnnnnnnnnnnnnnnnnnnnnnnnnnnnnnnnnnnnnnnnnnnnnnnnnnnnnnnnnnnnnnnnnnnnnnnnnnnnnnnnnnnnnnnnnnnnnnnnnnnnnnnnnnnnnnnnnnnnnnnnnnnnnnnnnnnnnnnnnnnnnnnnnnnnnnnnnnnnnnnnnnnnnnnnnnnnnnnnnnnnnnnnnnnnnnnnnnnnnnnnnnnnnnnnnnnnnnnnnnnnnnnnnnnnnnnnnnnnnnnnnnnnnnnnnnnnnnnnnnnnnnnnnnnnnnnnnnnnnnnnnnnnnnnnnnnnnnnnnnnnnnnnnnnnnnnnnnnnnnnnnnnnnnnnnnnnnnnnnnnnnnnnnnnnnnnnnnnnnnnnnnnnnnnnnnnnnnnnnnnnnnnnnnnnnnnnnnnnnnnnnnnnnnnnnnnnnnnnnnnnnnnnnnnnnnnnnnnnnnnnnnnnnnnnnnnnnnnnnnnnnnnnnnnnnnnnnnnnnnnnnnnnnnnnnnnnnnnnnnnnnnnnnnnnnnnnnnnnnnnnnnnnnnnnnnnnnnnnnnnnnnnnnnnnnnnnnnnnnnnnnnnnnnnnnnnnnnnnnnnnnnnnnnnnnnnnnnnnnnnnnnnnnnnnnnnnnnnnnnnnnnnnnnnnnnnnnnnnnnnnnnnnnnnnnnnnnnnnnnnnnnnnnnnnnnnnnnnnnnnnnnnnnnnnnnnnnnnnnnnnnnnnnnnnnnnnnnnnnnnnnnnnnnnnnnnnnnnnnnnnnnnnnnnnnnnnnnnnnnnnnnnnnnnnnnnnnnnnnnnnnnnnnnnnnnnnnnnnnnnnnnnnnnnnnnnnnnnnnnnnnnnnnnnnnnnnnnnnnnnnnnnnnnnnnnnnnnnnnnnnnnnnnnnnnnnnnnnnnnnnnnnnnnnnnnnnnnnnnnnnnnnnnnnnnnnnnnnnnnnnnnnnnnnnnnnnnnnnnnnnnnnnnnnnnnnnnnnnnnnnnnnnnnnnnnnnnnnnnnnnnnnnnnnnnnnnnnnnnnnnnnnnnnnnnnnnnnnnnnnnnnnnnnnnnnnnnnnnnnnnnnnnnnnnnnnnnnnnnnnnnnnnnnnnnnnnnnnnnnnnnnnnnnnnnnnnnnnnnnnnnnnnnnnnnnnnnnnnnnnnnnnnnnnnnnnnnnnnnnnnnnnnnnnnnnnnnnnnnnnnnnnnnnnnnnnnnnnnnnnnnnnnnnnnnnnnnnnnnnnnnnnnnnnnnnnnnnnnnnnnnnnnnnnnnnnnnnnnnnnnnnnnnnnnnnnnnnnnnnnnnnnnnnnnnnnnnnnnnnnnnnnnnnnnnnnnnnnnnnnnnnnnnnnnnnnnnnnnnnnnnnnnnnnnnnnnnnnnnnnnnnnnnnnnnnnnnnnnnnnnnnnnnnnnnnnnnnnnnnnnnnnnnnnnnnnnnnnnnnnnnnnnnnnnnnnnnnnnnnnnnnnnnnnnnnnnnnnnnnnnnnnnnnnnnnnnnnnnnnnnnnnnnnnnnnnnnnnnnnnnnnnnnnnnnnnnnnnnnnnnnnnnnnnnnnnnnnnnnnnnnnnnnnnnnnnnnnnnnnnnnnnnnnnnnnnnnnnnnnnnnnnnnnnnnnnnnnnnnnnnnnnnnnnnnnnnnnnnnnnnnnnnnnnnnnnnnnnnnnnnnnnnnnnnnnnnnnnnnnnnnnnnnnnnnnnnnnnnnnnnnnnnnnnnnnnnnnnnnnnnnnnnnnnnnnnnnnnnnnnnnnnnnnnnnnnnnnnnnnnnnnnnnnnnnnnnnnnnnnnnnnnnnnnnnnnnnnnnnnnnnnnnnnnnnnnnnnnnnnnnnnnnnnnnnnnnnnnnnnnnnnnnnnnnnnnnnnnnnnnnnnnnnnnnnnnnnnnnnnnnnnnnnnnnnnnnnnnnnnnnnnnnnnnnnnnnnnnnnnnnnnnnnnnnnnnnnnnnnnnnnnnnnnnnnnnnnnnnnnnnnnnnnnnnnnnnnnnnnnnnnnnnnnnnnnnnnnnnnnnnnnnnnnnnnnnnnnnnnnnnnnnnnnnnnnnnnnnnnnnnnnnnnnnnnnnnnnnnnnnnnnnnnnnnnnnnnnnnnnnnnnnnnnnnnnnnnnnnnnnnnnnnnnnnnnnnnnnnnnnnnnnnnnnnnnnnnnnnnnnnnnnnnnnnnnnnnnnnnnnnnnnnnnnnnnnnnnnnnnnnnnnnnnnnnnnnnnnnnnnnnnnnnnnnnnnnnnnnnnnnnnnnnnnnnnnnnnnnnnnnnnnnnnnnnnnnnnnnnnnnnnnnnnnnnnnnnnnnnnnnnnnnnnnnnnnnnnnnnnnnnnnnnnnnnnnnnnnnnnnnnnnnnnnnnnnnnnnnnnnnnnnnnnnnnnnnnnnnnnnnnnnnnnnnnnnnnnnnnnnnnnnnnnnnnnnnnnnnnnnnnnnnnnnnnnnnnnnnnnnnnnnnnnnnnnnnnnnnnnnnnnnnnnnnnnnnnnnnnnnnnnnnnnnnnnnnnnnnnnnnnnnnnnnnnnnnnnnnnnnnnnnnnnnnnnnnnnnnnnnnnnnnnnnnnnnnnnnnnnnnnnnnnnnnnnnnnnnnnnnnnnnnnnnnnnnnnnnnnnnnnnnnnnnnnnnnnnnnnnnnnnnnnnnnnnnnnnnnnnnnnnnnnnnnnnnnnnnnnnnnnnnnnnnnnnnnnnnnnnnnnnnnnnnnnnnnnnnnnnnnnnnnnnnnnnnnnnnnnnnnnnnnnnnnnnnnnnnnnnnnnnnnnnnnnnnnnnnnnnnnnnnnnnnnnnnnnnnnnnnnnnnnnnnnnnnnnnnnnnnnnnnnnnnnnnnnnnnnnnnnnnnnnnnnnnnnnnnnnnnnnnnnnnnnnnnnnnnnnnnnnnnnnnnnnnnnnnnnnnnnnnnnnnnnnnnnnnnnnnnnnnnnnnnnnnnnnnnnnnnnnnnnnnnnnnnnnnnnnnnnnnnnnnnnnnnnnnnnnnnnnnnnnnnnnnnnnnnnnnnnnnnnnnnnnnnnnnnnnnnnnnnnnnnnnnnnnnnnnnnnnnnnnnnnnnnnnnnnnnnnnnnnnnnnnnnnnnnnnnnnnnnnnnnnnnnnnnnnnnnnnnnnnnnnnnnnnnnnnnnnnnnnnnnnnnnnnnnnnnnnnnnnnnnnnnnnnnnnnnnnnnnnnnnnnnnnnnnnnnnnnnnnnnnnnnnnnnnnnnnnnnnnnnnnnnnnnnnnnnnnnnnnnnnnnnnnnnnnnnnnnnnnnnnnnnnnnnnnnnnnnnnnnnnnnnnnnnnnnnnnnnnnnnnnnnnnnnnnnnnnnnnnnnnnnnnnnnnnnnnnnnnnnnnnnnnnnnnnnnnnnnnnnnnnnnnnnnnnnnnnnnnnnnnnnnnnnnnnnnnnnnnnnnnnnnnnnnnnnnnnnnnnnnnnnnnnnnnnnnnnnnnnnnnnnnnnnnnnnnnnnnnnnnnnnnnnnnnnnnnnnnnnnnnnnnnnnnnnnnnnnnnnnnnnnnnnnnnnnnnnnnnnnnnnnnnnnnnnnnnnnnnnnnnnnnnnnnnnnnnnnnnnnnnnnnnnnnnnnnnnnnnnnnnnnnnnnnnnnnnnnnnnnnnnnnnnnnnnnnnnnnnnnnnnnnnnnnnnnnnnnnnnnnnnnnnnnnnnnnnnnnnnnnnnnnnnnnnnnnnnnnnnnnnnnnnnnnnnnnnnnnnnnnnnnnnnnnnnnnnnnnnnnnnnnnnnnnnnnnnnnnnnnnnnnnnnnnnnnnnnnnnnnnnnnnnnnnnnnnnnnnnnnnnnnnnnnnnnnnnnnnnnnnnnnnnnnnnnnnnnnnnnnnnnnnnnnnnnnnnnnnnnnnnnnnnnnnnnnnnnnnnnnnnnnnnnnnnnnnnnnnnnnnnnnnnnnnnnnnnnnnnnnnnnnnnnnnnnnnnnnnnnnnnnnnnnnnnnnnnnnnnnnnnnnnnnnnnnnnnnnnnnnnnnnnnnnnnnnnnnnnnnnnnnnnnnnnnnnnnnnnnnnnnnnnnnnnnnnnnnnnnnnnnnnnnnnnnnnnnnnnnnnnnnnnnnnnnnnnnnnnnnnnnnnnnnnnnnnnnnnnnnnnnnnnnnnnnnnnnnnnnnnnnnnnnnnnnnnnnnnnnnnnnnnnnnnnnnnnnnnnnnnnnnnnnnnnnnnnnnnnnnnnnnnnnnnnnnnnnnnnnnnnnnnnnnnnnnnnnnnnnnnnnnnnnnnnnnnnnnnnnnnnnnnnnnnnnnnnnnnnnnnnnnnnnnnnnnnnnnnnnnnnnnnnnnnnnnnnnnnnnnnnnnnnnnnnnnnnnnnnnnnnnnnnnnnnnnnnnnnnnnnnnnnnnnnnnnnnnnnnnnnnnnnnnnnnnnnnnnnnnnnnnnnnnnnnnnnnnnnnnnnnnnnnnnnnnnnnnnnnnnnnnnnnnnnnnnnnnnnnnnnnnnnnnnnnnnnnnnnnnnnnnnnnnnnnnnnnnnnnnnnnnnnnnnnnnnnnnnnnnnnnnnnnnnnnnnnnnnnnnnnnnnnnnnnnnnnnnnnnnnnnnnnnnnnnnnnnnnnnnnnnnnnnnnnnnnnnnnnnnnnnnnnnnnnnnnnnnnnnnnnnnnnnnnnnnnnnnnnnnnnnnnnnnnnnnnnnnnnnnnnnnnnnnnnnnnnnnnnnnnnnnnnnnnnnnnnnnnnnnnnnnnnnnnnnnnnnnnnnnnnnnnnnnnnnnnnnnnnnnnnnnnnnnnnnnnnnnnnnnnnnnnnnnnnnnnnnnnnnnnnnnnnnnnnnnnnnnnnnnnnnnnnnnnnnnnnnnnnnnnnnnnnnnnnnnnnnnnnnnnnnnnnnnnnnnnnnnnnnnnnnnnnnnnnnnnnnnnnnnnnnnnnnnnnnnnnnnnnnnnnnnnnnnnnnnnnnnnnnnnnnnnnnnnnnnnnnnnnnnnnnnnnnnnnnnnnnnnnnnnnnnnnnnnnnnnnnnnnnnnnnnnnnnnnnnnnnnnnnnnnnnnnnnnnnnnnnnnnnnnnnnnnnnnnnnnnnnnnnnnnnnnnnnnnnnnnnnnnnnnnnnnnnnnnnnnnnnnnnnnnnnnnnnnnnnnnnnnnnnnnnnnnnnnnnnnnnnnnnnnnnnnnnnnnnnnnnnnnnnnnnnnnnnnnnnnnnnnnnnnnnnnnnnnnnnnnnnnnnnnnnnnnnnnnnnnnnnnnnnnnnnnnnnnnnnnnnnnnnnnnnnnnnnnnnnnnnnnnnnnnnnnnnnnnnnnnnnnnnnnnnnnnnnnnnnnnnnnnnnnnnnnnnnnnnnnnnnnnnnnnnnnnnnnnnnnnnnnnnnnnnnnnnnnnnnnnnnnnnnnnnnnnnnnnnnnnnnnnnnnnnnnnnnnnnnnnnnnnnnnnnnnnnnnnnnnnnnnnnnnnnnnnnnnnnnnnnnnnnnnnnnnnnnnnnnnnnnnnnnnnnnnnnnnnnnnnnnnnnnnnnnnnnnnnnnnnnnnnnnnnnnnnnnnnnnnnnnnnnnnnnnnnnnnnnnnnnnnnnnnnnnnnnnnnnnnnnnnnnnnnnnnnnnnnnnnnnnnnnnnnnnnnnnnnnnnnnnnnnnnnnnnnnnnnnnnnnnnnnnnnnnnnnnnnnnnnnnnnnnnnnnnnnnnnnnnnnnnnnnnnnnnnnnnnnnnnnnnnnnnnnnnnnnnnnnnnnnnnnnnnnnnnnnnnnnnnnnnnnnnnnnnnnnnnnnnnnnnnnnnnnnnnnnnnnnnnnnnnnnnnnnnnnnnnnnnnnnnnnnnnnnnnnnnnnnnnnnnnnnnnnnnnnnnnnnnnnnnnnnnnnnnnnnnnnnnnnnnnnnnnnnnnnnnnnnnnnnnnnnnnnnnnnnnnnnnnnnnnnnnnnnnnnnnnnnnnnnnnnnnnnnnnnnnnnnnnnnnnnnnnnnnnnnnnnnnnnnnnnnnnnnnnnnnnnnnnnnnnnnnnnnnnnnnnnnnnnnnnnnnnnnnnnnnnnnnnnnnnnnnnnnnnnnnnnnnnnnnnnnnnnnnnnnnnnnnnnnnnnnnnnnnnnnnnnnnnnnnnnnnnnnnnnnnnnnnnnnnnnnnnnnnnnnnnnnnnnnnnnnnnnnnnnnnnnnnnnnnnnnnnnnnnnnnnnnnnnnnnnnnnnnnnnnnnnnnnnnnnnnnnnnnnnnnnnnnnnnnnnnnnnnnnnnnnnnnnnnnnnnnnnnnnnnnnnnnnnnnnnnnnnnnnnnnnnnnnnnnnnnnnnnnnnnnnnnnnnnnnnnnnnnnnnnnnnnnnnnnnnnnnnnnnnnnnnnnnnnnnnnnnnnnnnnnnnnnnnnnnnnnnnnnnnnnnnnnnnnnnnnnnnnnnnnnnnnnnnnnnnnnnnnnnnnnnnnnnnnnnnnnnnnnnnnnnnnnnnnnnnnnnnnnnnnnnnnnnnnnnnnnnnnnnnnnnnnnnnnnnnnnnnnnnnnnnnnnnnnnnnnnnnnnnnnnnnnnnnnnnnnnnnnnnnnnnnnnnnnnnnnnnnnnnnnnnnnnnnnnnnnnnnnnnnnnnnnnnnnnnnnnnnnnnnnnnnnnnnnnnnnnnnnnnnnnnnnnnnnnnnnnnnnnnnnnnnnnnnnnnnnnnnnnnnnnnnnnnnnnnnnnnnnnnnnnnnnnnnnnnnnnnnnnnnnnnnnnnnnnnnnnnnnnnnnnnnnnnnnnnnnnnnnnnnnnnnnnnnnnnnnnnnnnnnnnnnnnnnnnnnnnnnnnnnnnnnnnnnnnnnnnnnnnnnnnnnnnnnnnnnnnnnnnnnnnnnnnnnnnnnnnnnnnnnnnnnnnnnnnnnnnnnnnnnnnnnnnnnnnnnnnnnnnnnnnnnnnnnnnnnnnnnnnnnnnnnnnnnnnnnnnnnnnnnnnnnnnnnnnnnnnnnnnnnnnnnnnnnnnnnnnnnnnnnnnnnnnnnnnnnnnnnnnnnnnnnnnnnnnnnnnnnnnnnnnnnnnnnnnnnnnnnnnnnnnnnnnnnnnnnnnnnnnnnnnnnnnnnnnnnnnnnnnnnnnnnnnnnnnnnnnnnnnnnnnnnnnnnnnnnnnnnnnnnnnnnnnnnnnnnnnnnnnnnnnnnnnnnnnnnnnnnnnnnnnnnnnnnnnnnnnnnnnnnnnnnnnnnnnnnnnnnnnnnnnnnnnnnnnnnnnnnnnnnnnnnnnnnnnnnnnnnnnnnnnnnnnnnnnnnnnnnnnnnnnnnnnnnnnnnnnnnnnnnnnnnnnnnnnnnnnnnnnnnnnnnnnnnnnnnnnnnnnnnnnnnnnnnnnnnnnnnnnnnnnnnnnnnnnnnnnnnnnnnnnnnnnnnnnnnnnnnnnnnnnnnnnnnnnnnnnnnnnnnnnnnnnnnnnnnnnnnnnnnnnnnnnnnnnnnnnnnnnnnnnnnnnnnnnnnnnnnnnnnnnnnnnnnnnnnnnnnnnnnnnnnnnnnnnnnnnnnnnnnnnnnnnnnnnnnnnnnnnnnnnnnnnnnnnnnnnnnnnnnnnnnnnnnnnnnnnnnnnnnnnnnnnnnnnnnnnnnnnnnnnnnnnnnnnnnnnnnnnnnnnnnnnnnnnnnnnnnnnnnnnnnnnnnnnnnnnnnnnnnnnnnnnnnnnnnnnnnnnnnnnnnnnnnnnnnnnnnnnnnnnnnnnnnnnnnnnnnnnnnnnnnnnnnnnnnnnnnnnnnnnnnnnnnnnnnnnnnnnnnnnnnnnnnnnnnnnnnnnnnnnnnnnnnnnnnnnnnnnnnnnnnnnnnnnnnnnnnnnnnnnnnnnnnnnnnnnnnnnnnnnnnnnnnnnnnnnnnnnnnnnnnnnnnnnnnnnnnnnnnnnnnnnnnnnnnnnnnnnnnnnnnnnnnnnnnnnnnnnnnnnnnnnnnnnnnnnnnnnnnnnnnnnnnnnnnnnnnnnnnnnnnnnnnnnnnnnnnnnnnnnnnnnnnnnnnnnnnnnnnnnnnnnnnnnnnnnnnnnnnnnnnnnnnnnnnnnnnnnnnnnnnnnnnnnnnnnnnnnnnnnnnnnnnnnnnnnnnnnnnnnnnnnnnnnnnnnnnnnnnnnnnnnnnnnnnnnnnnnnnnnnnnnnnnnnnnnnnnnnnnnnnnnnnnnnnnnnnnnnnnnnnnnnnnnnnnnnnnnnnnnnnnnnnnnnnnnnnnnnnnnnnnnnnnnnnnnnnnnnnnnnnnnnnnnnnnnnnnnnnnnnnnnnnnnnnnnnnnnnnnnnnnnnnnnnnnnnnnnnnnnnnnnnnnnnnnnnnnnnnnnnnnnnnnnnnnnnnnnnnnnnnnnnnnnnnnnnnnnnnnnnnnnnnnnnnnnnnnnnnnnnnnnnnnnnnnnnnnnnnnnnnnnnnnnnnnnnnnnnnnnnnnnnnnnnnnnnnnnnnnnnnnnnnnnnnnnnnnnnnnnnnnnnnnnnnnnnnnnnnnnnnnnnnnnnnnnnnnnnnnnnnnnnnnnnnnnnnnnnnnnnnnnnnnnnnnnnnnnnnnnnnnnnnnnnnnnnnnnnnnnnnnnnnnnnnnnnnnnnnnnnnnnnnnnnnnnnnnnnnnnnnnnnnnnnnnnnnnnnnnnnnnnnnnnnnnnnnnnnnnnnnnnnnnnnnnnnnnnnnnnnnnnnnnnnnnnnnnnnnnnnnnnnnnnnnnnnnnnnnnnnnnnnnnnnnnnnnnnnnnnnnnnnnnnnnnnnnnnnnnnnnnnnnnnnnnnnnnnnnnnnnnnnnnnnnnnnnnnnnnnnnnnnnnnnnnnnnnnnnnnnnnnnnnnnnnnnnnnnnnnnnnnnnnnnnnnnnnnnnnnnnnnnnnnnnnnnnnnnnnnnnnnnnnnnnnnnnnnnnnnnnnnnnnnnnnnnnnnnnnnnnnnnnnnnnnnnnnnnnnnnnnnnnnnnnnnnnnnnnnnnnnnnnnnnnnnnnnnnnnnnnnnnnnnnnnnnnnnnnnnnnnnnnnnnnnnnnnnnnnnnnnnnnnnnnnnnnnnnnnnnnnnnnnnnnnnnnnnnnnnnnnnnnnnnnnnnnnnnnnnnnnnnnnnnnnnnnnnnnnnnnnnnnnnnnnnnnnnnnnnnnnnnnnnnnnnnnnnnnnnnnnnnnnnnnnnnnnnnnnnnnnnnnnnnnnnnnnnnnnnnnnnnnnnnnnnnnnnnnnnnnnnnnnnnnnnnnnnnnnnnnnnnnnnnnnnnnnnnnnnnnnnnnnnnnnnnnnnnnnnnnnnnnnnnnnnnnnnnnnnnnnnnnnnnnnnnnnnnnnnnnnnnnnnnnnnnnnnnnnnnnnnnnnnnnnnnnnnnnnnnnnnnnnnnnnnnnnnnnnnnnnnnnnnnnnnnnnnnnnnnnnnnnnnnnnnnnnnnnnnnnnnnnnnnnnnnnnnnnnnnnnnnnnnnnnnnnnnnnnnnnnnnnnnnnnnnnnnnnnnnnnnnnnnnnnnnnnnnnnnnnnnnnnnnnnnnnnnnnnnnnnnnnnnnnnnnnnnnnnnnnnnnnnnnnnnnnnnnnnnnnnnnnnnnnnnnnnnnnnnnnnnnnnnnnnnnnnnnnnnnnnnnnnnnnnnnnnnnnnnnnnnnnnnnnnnnnnnnnnnnnnnnnnnnnnnnnnnnnnnnnnnnnnnnnnnnnnnnnnnnnnnnnnnnnnnnnnnnnnnnnnnnnnnnnnnnnnnnnnnnnnnnnnnnnnnnnnnnnnnnnnnnnnnnnnnnnnnnnnnnnnnnnnnnnnnnnnnnnnnnnnnnnnnnnnnnnnnnnnnnnnnnnnnnnnnnnnnnnnnnnnnnnnnnnnnnnnnnnnnnnnnnnnnnnnnnnnnnnnnnnnnnnnnnnnnnnnnnnnnnnnnnnnnnnnnnnnnnnnnnnnnnnnnnnnnnnnnnnnnnnnnnnnnnnnnnnnnnnnnnnnnnnnnnnnnnnnnnnnnnnnnnnnnnnnnnnnnnnnnnnnnnnnnnnnnnnnnnnnnnnnnnnnnnnnnnnnnnnnnnnnnnnnnnnnnnnnnnnnnnnnnnnnnnnnnnnnnnnnnnnnnnnnnnnnnnnnnnnnnnnnnnnnnnnnnnnnnnnnnnnnnnnnnnnnnnnnnnnnnnnnnnnnnnnnnnnnnnnnnnnnnnnnnnnnnnnnnnnnnnnnnnnnnnnnnnnnnnnnnnnnnnnnnnnnnnnnnnnnnnnnnnnnnnnnnnnnnnnnnnnnnnnnnnnnnnnnnnnnnnnnnnnnnnnnnnnnnnnnnnnnnnnnnnnnnnnnnnnnnnnnnnnnnnnnnnnnnnnnnnnnnnnnnnnnnnnnnnnnnnnnnnnnnnnnnnnnnnnnnnnnnnnnnnnnnnnnnnnnnnnnnnnnnnnnnnnnnnnnnnnnnnnnnnnnnnnnnnnnnnnnnnnnnnnnnnnnnnnnnnnnnnnnnnnnnnnnnnnnnnnnnnnnnnnnnnnnnnnnnnnnnnnnnnnnnnnnnnnnnnnnnnnnnnnnnnnnnnnnnnnnnnnnnnnnnnnnnnnnnnnnnnnnnnnnnnnnnnnnnnnnnnnnnnnnnnnnnnnnnnnnnnnnnnnnnnnnnnnnnnnnnnnnnnnnnnnnnnnnnnnnnnnnnnnnnnnnnnnnnnnnnnnnnnnnnnnnnnnnnnnnnnnnnnnnnnnnnnnnnnnnnnnnnnnnnnnnnnnnnnnnnnnnnnnnnnnnnnnnnnnnnnnnnnnnnnnnnnnnnnnnnnnnnnnnnnnnnnnnnnnnnnnnnnnnnnnnnnnnnnnnnnnnnnnnnnnnnnnnnnnnnnnnnnnnnnnnnnnnnnnnnnnnnnnnnnnnnnnnnnnnnnnnnnnnnnnnnnnnnnnnnnnnnnnnnnnnnnnnnnnnnnnnnnnnnnnnnnnnnnnnnnnnnnnnnnnnnnnnnnnnnnnnnnnnnnnnnnnnnnnnnnnnnnnnnnnnnnnnnnnnnnnnnnnnnnnnnnnnnnnnnnnnnnnnnnnnnnnnnnnnnnnnnnnnnnnnnnnnnnnnnnnnnnnnnnnnnnnnnnnnnnnnnnnnnnnnnnnnnnnnnnnnnnnnnnnnnnnnnnnnnnnnnnnnnnnnnnnnnnnnnnnnnnnnnnnnnnnnnnnnnnnnnnnnnnnnnnnnnnnnnnnnnnnnnnnnnnnnnnnnnnnnnnnnnnnnnnnnnnnnnnnnnnnnnnnnnnnnnnnnnnnnnnnnnnnnnnnnnnnnnnnnnnnnnnnnnnnnnnnnnnnnnnnnnnnnnnnnnnnnnnnnnnnnnnnnnnnnnnnnnnnnnnnnnnnnnnnnnnnnnnnnnnnnnnnnnnnnnnnnnnnnnnnnnnnnnnnnnnnnnnnnnnnnnnnnnnnnnnnnnnnnnnnnnnnnnnnnnnnnnnnnnnnnnnnnnnnnnnnnnnnnnnnnnnnnnnnnnnnnnnnnnnnnnnnnnnnnnnnnnnnnnnnnnnnnnnnnnnnnnnnnnnnnnnnnnnnnnnnnnnnnnnnnnnnnnnnnnnnnnnnnnnnnnnnnnnnnnnnnnnnnnnnnnnnnnnnnnnnnnnnnnnnnnnnnnnnnnnnnnnnnnnnnnnnnnnnnnnnnnnnnnnnnnnnnnnnnnnnnnnnnnnnnnnnnnnnnnnnnnnnnnnnnnnnnnnnnnnnnnnnnnnnnnnnnnnnnnnnnnnnnnnnnnnnnnnnnnnnnnnnnnnnnnnnnnnnnnnnnnnnnnnnnnnnnnnnnnnnnnnnnnnnnnnnnnnnnnnnnnnnnnnnnnnnnnnnnnnnnnnnnnnnnnnnnnnnnnnnnnnnnnnnnnnnnnnnnnnnnnnnnnnnnnnnnnnnnnnnnnnnnnnnnnnnnnnnnnnnnnnnnnnnnnnnnnnnnnnnnnnnnnnnnnnnnnnnnnnnnnnnnnnnnnnnnnnnnnnnnnnnnnnnnnnnnnnnnnnnnnnnnnnnnnnnnnnnnnnnnnnnnnnnnnnnnnnnnnnnnnnnnnnnnnnnnnnnnnnnnnnnnnnnnnnnnnnnnnnnnnnnnnnnnnnnnnnnnnnnnnnnnnnnnnnnnnnnnnnnnnnnnnnnnnnnnnnnnnnnnnnnnnnnnnnnnnnnnnnnnnnnnnnnnnnnnnnnnnnnnnnnnnnnnnnnnnnnnnnnnnnnnnnnnnnnnnnnnnnnnnnnnnnnnnnnnnnnnnnnnnnnnnnnnnnnnnnnnnnnnnnnnnnnnnnnnnnnnnnnnnnnnnnnnnnnnnnnnnnnnnnnnnnnnnnnnnnnnnnnnnnnnnnnnnnnnnnnnnnnnnnnnnnnnnnnnnnnnnnnnnnnnnnnnnnnnnnnnnnnnnnnnnnnnnnnnnnnnnnnnnnnnnnnnnnnnnnnnnnnnnnnnnnnnnnnnnnnnnnnnnnnnnnnnnnnnnnnnnnnnnnnnnnnnnnnnnnnnnnnnnnnnnnnnnnnnnnnnnnnnnnnnnnnnnnnnnnnnnnnnnnnnnnnnnnnnnnnnnnnnnnnnnnnnnnnnnnnnnnnnnnnnnnnnnnnnnnnnnnnnnnnnnnnnnnnnnnnnnnnnnnnnnnnnnnnnnnnnnnnnnnnnnnnnnnnnnnnnnnnnnnnnnnnnnnnnnnnnnnnnnnnnnnnnnnnnnnnnnnnnnnnnnnnnnnnnnnnnnnnnnnnnnnnnnnnnnnnnnnnnnnnnnnnnnnnnnnnnnnnnnnnnnnnnnnnnnnnnnnnnnnnnnnnnnnnnnnnnnnnnnnnnnnnnnnnnnnnnnnnnnnnnnnnnnnnnnnnnnnnnnnnnnnnnnnnnnnnnnnnnnnnnnnnnnnnnnnnnnnnnnnnnnnnnnnnnnnnnnnnnnnnnnnnnnnnnnnnnnnnnnnnnnnnnnnnnnnnnnnnnnnnnnnnnnnnnnnnnnnnnnnnnnnnnnnnnnnnnnnnnnnnnnnnnnnnnnnnnnnnnnnnnnnnnnnnnnnnnnnnnnnnnnnnnnnnnnnnnnnnnnnnnnnnnnnnnnnnnnnnnnnnnnnnnnnnnnnnnnnnnnnnnnnnnnnnnnnnnnnnnnnnnnnnnnnnnnnnnnnnnnnnnnnnnnnnnnnnnnnnnnnnnnnnnnnnnnnnnnnnnnnnnnnnnnnnnnnnnnnnnnnnnnnnnnnnnnnnnnnnnnnnnnnnnnnnnnnnnnnnnnnnnnnnnnnnnnnnnnnnnnnnnnnnnnnnnnnnnnnnnnnnnnnnnnnnnnnnnnnnnnnnnnnnnnnnnnnnnnnnnnnnnnnnnnnnnnnnnnnnnnnnnnnnnnnnnnnnnnnnnnnnnnnnnnnnnnnnnnnnnnnnnnnnnnnnnnnnnnnnnnnnnnnnnnnnnnnnnnnnnnnnnnnnnnnnnnnnnnnnnnnnnnnnnnnnnnnnnnnnnnnnnnnnnnnnnnnnnnnnnnnnnnnnnnnnnnnnnnnnnnnnnnnnnnnnnnnnnnnnnnnnnnnnnnnnnnnnnnnnnnnnnnnnnnnnnnnnnnnnnnnnnnnnnnnnnnnnnnnnnnnnnnnnnnnnnnnnnnnnnnnnnnnnnnnnnnnnnnnnnnnnnnnnnnnnnnnnnnnnnnnnnnnnnnnnnnnnnnnnnnnnnnnnnnnnnnnnnnnnnnnnnnnnnnnnnnnnnnnnnnnnnnnnnnnnnnnnnnnnnnnnnnnnnnnnnnnnnnnnnnnnnnnnnnnnnnnnnnnnnnnnnnnnnnnnnnnnnnnnnnnnnnnnnnnnnnnnnnnnnnnnnnnnnnnnnnnnnnnnnnnnnnnnnnnnnnnnnnnnnnnnnnnnnnnnnnnnnnnnnnnnnnnnnnnnnnnnnnnnnnnnnnnnnnnnnnnnnnnnnnnnnnnnnnnnnnnnnnnnnnnnnnnnnnnnnnnnnnnnnnnnnnnnnnnnnnnnnnnnnnnnnnnnnnnnnnnnnnnnnnnnnnnnnnnnnnnnnnnnnnnnnnnnnnnnnnnnnnnnnnnnnnnnnnnnnnnnnnnnnnnnnnnnnnnnnnnnnnnnnnnnnnnnnnnnnnnnnnnnnnnnnnnnnnnnnnnnnnnnnnnnnnnnnnnnnnnnnnnnnnnnnnnnnnnnnnnnnnnnnnnnnnnnnnnnnnnnnnnnnnnnnnnnnnnnnnnnnnnnnnnnnnnnnnnnnnnnnnnnnnnnnnnnnnnnnnnnnnnnnnnnnnnnnnnnnnnnnnnnnnnnnnnnnnnnnnnnnnnnnnnnnnnnnnnnnnnnnnnnnnnnnnnnnnnnnnnnnnnnnnnnnnnnnnnnnnnnnnnnnnnnnnnnnnnnnnnnnnnnnnnnnnnnnnnnnnnnnnnnnnnnnnnnnnnnnnnnnnnnnnnnnnnnnnnnnnnnnnnnnnnnnnnnnnnnnnnnnnnnnnnnnnnnnnnnnnnnnnnnnnnnnnnnnnnnnnnnnnnnnnnnnnnnnnnnnnnnnnnnnnnnnnnnnnnnnnnnnnnnnnnnnnnnnnnnnnnnnnnnnnnnnnnnnnnnnnnnnnnnnnnnnnnnnnnnnnnnnnnnnnnnnnnnnnnnnnnnnnnnnnnnnnnnnnnnnnnnnnnnnnnnnnnnnnnnnnnnnnnnnnnnnnnnnnnnnnnnnnnnnnnnnnnnnnnnnnnnnnnnnnnnnnnnnnnnnnnnnnnnnnnnnnnnnnnnnnnnnnnnnnnnnnnnnnnnnnnnnnnnnnnnnnnnnnnnnnnnnnnnnnnnnnnnnnnnnnnnnnnnnnnnnnnnnnnnnnnnnnnnnnnnnnnnnnnnnnnnnnnnnnnnnnnnnnnnnnnnnnnnnnnnnnnnnnnnnnnnnnnnnnnnnnnnnnnnnnnnnnnnnnnnnnnnnnnnnnnnnnnnnnnnnnnnnnnnnnnnnnnnnnnnnnnnnnnnnnnnnnnnnnnnnnnnnnnnnnnnnnnnnnnnnnnnnnnnnnnnnnnnnnnnnnnnnnnnnnnnnnnnnnnnnnnnnnnnnnnnnnnnnnnnnnnnnnnnnnnnnnnnnnnnnnnnnnnnnnnnnnnnnnnnnnnnnnnnnnnnnnnnnnnnnnnnnnnnnnnnnnnnnnnnnnnnnnnnnnnnnnnnnnnnnnnnnnnnnnnnnnnnnnnnnnnnnnnnnnnnnnnnnnnnnnnnnnnnnnnnnnnnnnnnnnnnnnnnnnnnnnnnnnnnnnnnnnnnnnnnnnnnnnnnnnnnnnnnnnnnnnnnnnnnnnnnnnnnnnnnnnnnnnnnnnnnnnnnnnnnnnnnnnnnnnnnnnnnnnnnnnnnnnnnnnnnnnnnnnnnnnnnnnnnnnnnnnnnnnnnnnnnnnnnnnnnnnnnnnnnnnnnnnnnnnnnnnnnnnnnnnnnnnnnnnnnnnnnnnnnnnnnnnnnnnnnnnnnnnnnnnnnnnnnnnnnnnnnnnnnnnnnnnnnnnnnnnnnnnnnnnnnnnnnnnnnnnnnnnnnnnnnnnnnnnnnnnnnnnnnnnnnnnnnnnnnnnnnnnnnnnnnnnnnnnnnnnnnnnnnnnnnnnnnnnnnnnnnnnnnnnnnnnnnnnnnnnnnnnnnnnnnnnnnnnnnnnnnnnnnnnnnnnnnnnnnnnnnnnnnnnnnnnnnnnnnnnnnnnnnnnnnnnnnnnnnnnnnnnnnnnnnnnnnnnnnnnnnnnnnnnnnnnnnnnnnnnnnnnnnnnnnnnnnnnnnnnnnnnnnnnnnnnnnnnnnnnnnnnnnnnnnnnnnnnnnnnnnnnnnnnnnnnnnnnnnnnnnnnnnnnnnnnnnnnnnnnnnnnnnnnnnnnnnnnnnnnnnnnnnnnnnnnnnnnnnnnnnnnnnnnnnnnnnnnnnnnnnnnnnnnnnnnnnnnnnnnnnnnnnnnnnnnnnnnnnnnnnnnnnnnnnnnnnnnnnnnnnnnnnnnnnnnnnnnnnnnnnnnnnnnnnnnnnnnnnnnnnnnnnnnnnnnnnnnnnnnnnnnnnnnnnnnnnnnnnnnnnnnnnnnnnnnnnnnnnnnnnnnnnnnnnnnnnnnnnnnnnnnnnnnnnnnnnnnnnnnnnnnnnnnnnnnnnnnnnnnnnnnnnnnnnnnnnnnnnnnnnnnnnnnnnnnnnnnnnnnnnnnnnnnnnnnnnnnnnnnnnnnnnnnnnnnnnnnnnnnnnnnnnnnnnnnnnnnnnnnnnnnnnnnnnnnnnnnnnnnnnnnnnnnnnnnnnnnnnnnnnnnnnnnnnnnnnnnnnnnnnnnnnnnnnnnnnnnnnnnnnnnnnnnnnnnnnnnnnnnnnnnnnnnnnnnnnnnnnnnnnnnnnnnnnnnnnnnnnnnnnnnnnnnnnnnnnnnnnnnnnnnnnnnnnnnnnnnnnnnnnnnnnnnnnnnnnnnnnnnnnnnnnnnnnnnnnnnnnnnnnnnnnnnnnnnnnnnnnnnnnnnnnnnnnnnnnnnnnnnnnnnnnnnnnnnnnnnnnnnnnnnnnnnnnnnnnnnnnnnnnnnnnnnnnnnnnnnnnnnnnnnnnnnnnnnnnnnnnnnnnnnnnnnnnnnnnnnnnnnnnnnnnnnnnnnnnnnnnnnnnnnnnnnnnnnnnnnnnnnnnnnnnnnnnnnnnnnnnnnnnnnnnnnnnnnnnnnnnnnnnnnnnnnnnnnnnnnnnnnnnnnnnnnnnnnnnnnnnnnnnnnnnnnnnnnnnnnnnnnnnnnnnnnnnnnnnnnnnnnnnnnnnnnnnnnnnnnnnnnnnnnnnnnnnnnnnnnnnnnnnnnnnnnnnnnnnnnnnnnnnnnnnnnnnnnnnnnnnnnnnnnnnnnnnnnnnnnnnnnnnnnnnnnnnnnnnnnnnnnnnnnnnnnnnnnnnnnnnnnnnnnnnnnnnnnnnnnnnnnnnnnnnnnnnnnnnnnnnnnnnnnnnnnnnnnnnnnnnnnnnnnnnnnnnnnnnnnnnnnnnnnnnnnnnnnnnnnnnnnnnnnnnnnnnnnnnnnnnnnnnnnnnnnnnnnnnnnnnnnnnnnnnnnnnnnnnnnnnnnnnnnnnnnnnnnnnnnnnnnnnnnnnnnnnnnnnnnnnnnnnnnnnnnnnnnnnnnnnnnnnnnnnnnnnnnnnnnnnnnnnnnnnnnnnnnnnnnnnnnnnnnnnnnnnnnnnnnnnnnnnnnnnnnnnnnnnnnnnnnnnnnnnnnnnnnnnnnnnnnnnnnnnnnnnnnnnnnnnnnnnnnnnnnnnnnnnnnnnnnnnnnnnnnnnnnnnnnnnnnnnnnnnnnnnnnnnnnnnnnnnnnnnnnnnnnnnnnnnnnnnnnnnnnnnnnnnnnnnnnnnnnnnnnnnnnnnnnnnnnnnnnnnnnnnnnnnnnnnnnnnnnnnnnnnnnnnnnnnnnnnnnnnnnnnnnnnnnnnnnnnnnnnnnnnnnnnnnnnnnnnnnnnnnnnnnnnnnnnnnnnnnnnnnnnnnnnnnnnnnnnnnnnnnnnnnnnnnnnnnnnnnnnnnnnnnnnnnnnnnnnnnnnnnnnnnnnnnnnnnnnnnnnnnnnnnnnnnnnnnnnnnnnnnnnnnnnnnnnnnnnnnnnnnnnnnnnnnnnnnnnnnnnnnnnnnnnnnnnnnnnnnnnnnnnnnnnnnnnnnnnnnnnnnnnnnnnnnnnnnnnnnnnnnnnnnnnnnnnnnnnnnnnnnnnnnnnnnnnnnnnnnnnnnnnnnnnnnnnnnnnnnnnnnnnnnnnnnnnnnnnnnnnnnnnnnnnnnnnnnnnnnnnnnnnnnnnnnnnnnnnnnnnnnnnnnnnnnnnnnnnnnnnnnnnnnnnnnnnnnnnnnnnnnnnnnnnnnnnnnnnnnnnnnnnnnnnnnnnnnnnnnnnnnnnnnnnnnnnnnnnnnnnnnnnnnnnnnnnnnnnnnnnnnnnnnnnnnnnnnnnnnnnnnnnnnnnnnnnnnnnnnnnnnnnnnnnnnnnnnnnnnnnnnnnnnnnnnnnnnnnnnnnnnnnnnnnnnnnnnnnnnnnnnnnnnnnnnnnnnnnnnnnnnnnnnnnnnnnnnnnnnnnnnnnnnnnnnnnnnnnnnnnnnnnnnnnnnnnnnnnnnnnnnnnnnnnnnnnnnnnnnnnnnnnnnnnnnnnnnnnnnnnnnnnnnnnnnnnnnnnnnnnnnnnnnnnnnnnnnnnnnnnnnnnnnnnnnnnnnnnnnnnnnnnnnnnnnnnnnnnnnnnnnnnnnnnnnnnnnnnnnnnnnnnnnnnnnnnnnnnnnnnnnnnnnnnnnnnnnnnnnnnnnnnnnnnnnnnnnnnnnnnnnnnnnnnnnnnnnnnnnnnnnnnnnnnnnnnnnnnnnnnnnnnnnnnnnnnnnnnnnnnnnnnnnnnnnnnnnnnnnnnnnnnnnnnnnnnnnnnnnnnnnnnnnnnnnnnnnnnnnnnnnnnnnnnnnnnnnnnnnnnnnnnnnnnnnnnnnnnnnnnnnnnnnnnnnnnnnnnnnnnnnnnnnnnnnnnnnnnnnnnnnnnnnnnnnnnnnnnnnnnnnnnnnnnnnnnnnnnnnnnnnnnnnnnnnnnnnnnnnnnnnnnnnnnnnnnnnnnnnnnnnnnnnnnnnnnnnnnnnnnnnnnnnnnnnnnnnnnnnnnnnnnnnnnnnnnnnnnnnnnnnnnnnnnnnnnnnnnnnnnnnnnnnnnnnnnnnnnnnnnnnnnnnnnnnnnnnnnnnnnnnnnnnnnnnnnnnnnnnnnnnnnnnnnnnnnnnnnnnnnnnnnnnnnnnnnnnnnnnnnnnnnnnnnnnnnnnnnnnnnnnnnnnnnnnnnnnnnnnnnnnnnnnnnnnnnnnnnnnnnnnnnnnnnnnnnnnnnnnnnnnnnnnnnnnnnnnnnnnnnnnnnnnnnnnnnnnnnnnnnnnnnnnnnnnnnnnnnnnnnnnnnnnnnnnnnnnnnnnnnnnnnnnnnnnnnnnnnnnnnnnnnnnnnnnnnnnnnnnnnnnnnnnnnnnnnnnnnnnnnnnnnnnnnnnnnnnnnnnnnnnnnnnnnnnnnnnnnnnnnnnnnnnnnnnnnnnnnnnnnnnnnnnnnnnnnnnnnnnnnnnnnnnnnnnnnnnnnnnnnnnnnnnnnnnnnnnnnnnnnnnnnnnnnnnnnnnnnnnnnnnnnnnnnnnnnnnnnnnnnnnnnnnnnnnnnnnnnnnnnnnnnnnnnnnnnnnnnnnnnnnnnnnnnnnnnnnnnnnnnnnnnnnnnnnnnnnnnnnnnnnnnnnnnnnnnnnnnnnnnnnnnnnnnnnnnnnnnnnnnnnnnnnnnnnnnnnnnnnnnnnnnnnnnnnnnnnnnnnnnnnnnnnnnnnnnnnnnnnnnnnnnnnnnnnnnnnnnnnnnnnnnnnnnnnnnnnnnnnnnnnnnnnnnnnnnnnnnnnnnnnnnnnnnnnnnnnnnnnnnnnnnnnnnnnnnnnnnnnnnnnnnnnnnnnnnnnnnnnnnnnnnnnnnnnnnnnnnnnnnnnnnnnnnnnnnnnnnnnnnnnnnnnnnnnnnnnnnnnnnnnnnnnnnnnnnnnnnnnnnnnnnnnnnnnnnnnnnnnnnnnnnnnnnnnnnnnnnnnnnnnnnnnnnnnnnnnnnnnnnnnnnnnnnnnnnnnnnnnnnnnnnnnnnnnnnnnnnnnnnnnnnnnnnnnnnnnnnnnnnnnnnnnnnnnnnnnnnnnnnnnnnnnnnnnnnnnnnnnnnnnnnnnnnnnnnnnnnnnnnnnnnnnnnnnnnnnnnnnnnnnnnnnnnnnnnnnnnnnnnnnnnnnnnnnnnnnnnnnnnnnnnnnnnnnnnnnnnnnnnnnnnnnnnnnnnnnnnnnnnnnnnnnnnnnnnnnnnnnnnnnnnnnnnnnnnnnnnnnnnnnnnnnnnnnnnnnnnnnnnnnnnnnnnnnnnnnnnnnnnnnnnnnnnnnnnnnnnnnnnnnnnnnnnnnnnnnnnnnnnnnnnnnnnnnnnnnnnnnnnnnnnnnnnnnnnnnnnnnnnnnnnnnnnnnnnnnnnnnnnnnnnnnnnnnnnnnnnnnnnnnnnnnnnnnnnnnnnnnnnnnnnnnnnnnnnnnnnnnnnnnnnnnnnnnnnnnnnnnnnnnnnnnnnnnnnnnnnnnnnnnnnnnnnnnnnnnnnnnnnnnnnnnnnnnnnnnnnnnnnnnnnnnnnnnnnnnnnnnnnnnnnnnnnnnnnnnnnnnnnnnnnnnnnnnnnnnnnnnnnnnnnnnnnnnnnnnnnnnnnnnnnnnnnnnnnnnnnnnnnnnnnnnnnnnnnnnnnnnnnnnnnnnnnnnnnnnnnnnnnnnnnnnnnnnnnnnnnnnnnnnnnnnnnnnnnnnnnnnnnnnnnnnnnnnnnnnnnnnnnnnnnnnnnnnnnnnnnnnnnnnnnnnnnnnnnnnnnnnnnnnnnnnnnnnnnnnnnnnnnnnnnnnnnnnnnnnnnnnnnnnnnnnnnnnnnnnnnnnnnnnnnnnnnnnnnnnnnnnnnnnnnnnnnnnnnnnnnnnnnnnnnnnnnnnnnnnnnnnnnnnnnnnnnnnnnnnnnnnnnnnnnnnnnnnnnnnnnnnnnnnnnnnnnnnnnnnnnnnnnnnnnnnnnnnnnnnnnnnnnnnnnnnnnnnnnnnnnnnnnnnnnnnnnnnnnnnnnnnnnnnnnnnnnnnnnnnnnnnnnnnnnnnnnnnnnnnnnnnnnnnnnnnnnnnnnnnnnnnnnnnnnnnnnnnnnnnnnnnnnnnnnnnnnnnnnnnnnnnnnnnnnnnnnnnnnnnnnnnnnnnnnnnnnnnnnnnnnnnnnnnnnnnnnnnnnnnnnnnnnnnnnnnnnnnnnnnnnnnnnnnnnnnnnnnnnnnnnnnnnnnnnnnnnnnnnnnnnnnnnnnnnnnnnnnnnnnnnnnnnnnnnnnnnnnnnnnnnnnnnnnnnnnnnnnnnnnnnnnnnnnnnnnnnnnnnnnnnnnnnnnnnnnnnnnnnnnnnnnnnnnnnnnnnnnnnnnnnnnnnnnnnnnnnnnnnnnnnnnnnnnnnnnnnnnnnnnnnnnnnnnnnnnnnnnnnnnnnnnnnnnnnnnnnnnnnnnnnnnnnnnnnnnnnnnnnnnnnnnnnnnnnnnnnnnnnnnnnnnnnnnnnnnnnnnnnnnnnnnnnnnnnnnnnnnnnnnnnnnnnnnnnnnnnnnnnnnnnnnnnnnnnnnnnnnnnnnnnnnnnnnnnnnnnnnnnnnnnnnnnnnnnnnnnnnnnnnnnnnnnnnnnnnnnnnnnnnnnnnnnnnnnnnnnnnnnnnnnnnnnnnnnnnnnnnnnnnnnnnnnnnnnnnnnnnnnnnnnnnnnnnnnnnnnnnnnnnnnnnnnnnnnnnnnnnnnnnnnnnnnnnnnnnnnnnnnnnnnnnnnnnnnnnnnnnnnnnnnnnnnnnnnnnnnnnnnnnnnnnnnnnnnnnnnnnnnnnnnnnnnnnnnnnnnnnnnnnnnnnnnnnnnnnnnnnnnnnnnnnnnnnnnnnnnnnnnnnnnnnnnnnnnnnnnnnnnnnnnnnnnnnnnnnnnnnnnnnnnnnnnnnnnnnnnnnnnnnnnnnnnnnnnnnnnnnnnnnnnnnnnnnnnnnnnnnnnnnnnnnnnnnnnnnnnnnnnnnnnnnnnnnnnnnnnnnnnnnnnnnnnnnnnnnnnnnnnnnnnnnnnnnnnnnnnnnnnnnnnnnnnnnnnnnnnnnnnnnnnnnnnnnnnnnnnnnnnnnnnnnnnnnnnnnnnnnnnnnnnnnnnnnnnnnnnnnnnnnnnnnnnnnnnnnnnnnnnnnnnnnnnnnnnnnnnnnnnnnnnnnnnnnnnnnnnnnnnnnnnnnnnnnnnnnnnnnnnnnnnnnnnnnnnnnnnnnnnnnnnnnnnnnnnnnnnnnnnnnnnnnnnnnnnnnnnnnnnnnnnnnnnnnnnnnnnnnnnnnnnnnnnnnnnnnnnnnnnnnnnnnnnnnnnnnnnnnnnnnnnnnnnnnnnnnnnnnnnnnnnnnnnnnnnnnnnnnnnnnnnnnnnnnnnnnnnnnnnnnnnnnnnnnnnnnnnnnnnnnnnnnnnnnnnnnnnnnnnnnnnnnnnnnnnnnnnnnnnnnnnnnnnnnnnnnnnnnnnnnnnnnnnnnnnnnnnnnnnnnnnnnnnnnnnnnnnnnnnnnnnnnnnnnnnnnnnnnnnnnnnnnnnnnnnnnnnnnnnnnnnnnnnnnnnnnnnnnnnnnnnnnnnnnnnnnnnnnnnnnnnnnnnnnnnnnnnnnnnnnnnnnnnnnnnnnnnnnnnnnnnnnnnnnnnnnnnnnnnnnnnnnnnnnnnnnnnnnnnnnnnnnnnnnnnnnnnnnnnnnnnnnnnnnnnnnnnnnnnnnnnnnnnnnnnnnnnnnnnnnnnnnnnnnnnnnnnnnnnnnnnnnnnnnnnnnnnnnnnnnnnnnnnnnnnnnnnnnnnnnnnnnnnnnnnnnnnnnnnnnnnnnnnnnnnnnnnnnnnnnnnnnnnnnnnnnnnnnnnnnnnnnnnnnnnnnnnnnnnnnnnnnnnnnnnnnnnnnnnnnnnnnnnnnnnnnnnnnnnnnnnnnnnnnnnnnnnnnnnnnnnnnnnnnnnnnnnnnnnnnnnnnnnnnnnnnnnnnnnnnnnnnnnnnnnnnnnnnnnnnnnnnnnnnnnnnnnnnnnnnnnnnnnnnnnnnnnnnnnnnnnnnnnnnnnnnnnnnnnnnnnnnnnnnnnnnnnnnnnnnnnnnnnnnnnnnnnnnnnnnnnnnnnnnnnnnnnnnnnnnnnnnnnnnnnnnnnnnnnnnnnnnnnnnnnnnnnnnnnnnnnnnnnnnnnnnnnnnnnnnnnnnnnnnnnnnnnnnnnnnnnnnnnnnnnnnnnnnnnnnnnnnnnnnnnnnnnnnnnnnnnnnnnnnnnnnnnnnnnnnnnnnnnnnnnnnnnnnnnnnnnnnnnnnnnnnnnnnnnnnnnnnnnnnnnnnnnnnnnnnnnnnnnnnnnnnnnnnnnnnnnnnnnnnnnnnnnnnnnnnnnnnnnnnnnnnnnnnnnnnnnnnnnnnnnnnnnnnnnnnnnnnnnnnnnnnnnnnnnnnnnnnnnnnnnnnnnnnnnnnnnnnnnnnnnnnnnnnnnnnnnnnnnnnnnnnnnnnnnnnnnnnnnnnnnnnnnnnnnnnnnnnnnnnnnnnnnnnnnnnnnnnnnnnnnnnnnnnnnnnnnnnnnnnnnnnnnnnnnnnnnnnnnnnnnnnnnnnnnnnnnnnnnnnnnnnnnnnnnnnnnnnnnnnnnnnnnnnnnnnnnnnnnnnnnnnnnnnnnnnnnnnnnnnnnnnnnnnnnnnnnnnnnnnnnnnnnnnnnnnnnnnnnnnnnnnnnnnnnnnnnnnnnnnnnnnnnnnnnnnnnnnnnnnnnnnnnnnnnnnnnnnnnnnnnnnnnnnnnnnnnnnnnnnnnnnnnnnnnnnnnnnnnnnnnnnnnnnnnnnnnnnnnnnnnnnnnnnnnnnnnnnnnnnnnnnnnnnnnnnnnnnnnnnnnnnnnnnnnnnnnnnnnnnnnnnnnnnnnnnnnnnnnnnnnnnnnnnnnnnnnnnnnnnnnnnnnnnnnnnnnnnnnnnnnnnnnnnnnnnnnnnnnnnnnnnnnnnnnnnnnnnnnnnnnnnnnnnnnnnnnnnnnnnnnnnnnnnnnnnnnnnnnnnnnnnnnnnnnnnnnnnnnnnnnnnnnnnnnnnnnnnnnnnnnnnnnnnnnnnnnnnnnnnnnnnnnnnnnnnnnnnnnnnnnnnnnnnnnnnnnnnnnnnnnnnnnnnnnnnnnnnnnnnnnnnnnnnnnnnnnnnnnnnnnnnnnnnnnnnnnnnnnnnnnnnnnnnnnnnnnnnnnnnnnnnnnnnnnnnnnnnnnnnnnnnnnnnnnnnnnnnnnnnnnnnnnnnnnnnnnnnnnnnnnnnnnnnnnnnnnnnnnnnnnnnnnnnnnnnnnnnnnnnnnnnnnnnnnnnnnnnnnnnnnnnnnnnnnnnnnnnnnnnnnnnnnnnnnnnnnnnnnnnnnnnnnnnnnnnnnnnnnnnnnnnnnnnnnnnnnnnnnnnnnnnnnnnnnnnnnnnnnnnnnnnnnnnnnnnnnnnnnnnnnnnnnnnnnnnnnnnnnnnnnnnnnnnnnnnnnnnnnnnnnnnnnnnnnnnnnnnnnnnnnnnnnnnnnnnnnnnnnnnnnnnnnnnnnnnnnnnnnnnnnnnnnnnnnnnnnnnnnnnnnnnnnnnnnnnnnnnnnnnnnnnnnnnnnnnnnnnnnnnnnnnnnnnnnnnnnnnnnnnnnnnnnnnnnnnnnnnnnnnnnnnnnnnnnnnnnnnnnnnnnnnnnnnnnnnnnnnnnnnnnnnnnnnnnnnnnnnnnnnnnnnnnnnnnnnnnnnnnnnnnnnnnnnnnnnnnnnnnnnnnnnnnnnnnnnnnnnnnnnnnnnnnnnnnnnnnnnnnnnnnnnnnnnnnnnnnnnnnnnnnnnnnnnnnnnnnnnnnnnnnnnnnnnnnnnnnnnnnnnnnnnnnnnnnnnnnnnnnnnnnnnnnnnnnnnnnnnnnnnnnnnnnnnnnnnnnnnnnnnnnnnnnnnnnnnnnnnnnnnnnnnnnnnnnnnnnnnnnnnnnnnnnnnnnnnnnnnnnnnnnnnnnnnnnnnnnnnnnnnnnnnnnnnnnnnnnnnnnnnnnnnnnnnnnnnnnnnnnnnnnnnnnnnnnnnnnnnnnnnnnnnnnnnnnnnnnnnnnnnnnnnnnnnnnnnnnnnnnnnnnnnnnnnnnnnnnnnnnnnnnnnnnnnnnnnnnnnnnnnnnnnnnnnnnnnnnnnnnnnnnnnnnnnnnnnnnnnnnnnnnnnnnnnnnnnnnnnnnnnnnnnnnnnnnnnnnnnnnnnnnnnnnnnnnnnnnnnnnnnnnnnnnnnnnnnnnnnnnnnnnnnnnnnnnnnnnnnnnnnnnnnnnnnnnnnnnnnnnnnnnnnnnnnnnnnnnnnnnnnnnnnnnnnnnnnnnnnnnnnnnnnnnnnnnnnnnnnnnnnnnnnnnnnnnnnnnnnnnnnnnnnnnnnnnnnnnnnnnnnnnnnnnnnnnnnnnnnnnnnnnnnnnnnnnnnnnnnnnnnnnnnnnnnnnnnnnnnnnnnnnnnnnnnnnnnnnnnnnnnnnnnnnnnnnnnnnnnnnnnnnnnnnnnnnnnnnnnnnnnnnnnnnnnnnnnnnnnnnnnnnnnnnnnnnnnnnnnnnnnnnnnnnnnnnnnnnnnnnnnnnnnnnnnnnnnnnnnnnnnnnnnnnnnnnnnnnnnnnnnnnnnnnnnnnnnnnnnnnnnnnnnnnnnnnnnnnnnnnnnnnnnnnnnnnnnnnnnnnnnnnnnnnnnnnnnnnnnnnnnnnnnnnnnnnnnnnnnnnnnnnnnnnnnnnnnnnnnnnnnnnnnnnnnnnnnnnnnnnnnnnnnnnnnnnnnnnnnnnnnnnnnnnnnnnnnnnnnnnnnnnnnnnnnnnnnnnnnnnnnnnnnnnnnnnnnnnnnnnnnnnnnnnnnnnnnnnnnnnnnnnnnnnnnnnnnnnnnnnnnnnnnnnnnnnnnnnnnnnnnnnnnnnnnnnnnnnnnnnnnnnnnnnnnnnnnnnnnnnnnnnnnnnnnnnnnnnnnnnnnnnnnnnnnnnnnnnnnnnnnnnnnnnnnnnnnnnnnnnnnnnnnnnnnnnnnnnnnnnnnnnnnnnnnnnnnnnnnnnnnnnnnnnnnnnnnnnnnnnnnnnnnnnnnnnnnnnnnnnnnnnnnnnnnnnnnnnnnnnnnnnnnnnnnnnnnnnnnnnnnnnnnnnnnnnnnnnnnnnnnnnnnnnnnnnnnnnnnnnnnnnnnnnnnnnnnnnnnnnnnnnnnnnnnnnnnnnnnnnnnnnnnnnnnnnnnnnnnnnnnnnnnnnnnnnnnnnnnnnnnnnnnnnnnnnnnnnnnnnnnnnnnnnnnnnnnnnnnnnnnnnnnnnnnnnnnnnnnnnnnnnnnnnnnnnnnnnnnnnnnnnnnnnnnnnnnnnnnnnnnnnnnnnnnnnnnnnnnnnnnnnnnnnnnnnnnnnnnnnnnnnnnnnnnnnnnnnnnnnnnnnnnnnnnnnnnnnnnnnnnnnnnnnnnnnnnnnnnnnnnnnnnnnnnnnnnnnnnnnnnnnnnnnnnnnnnnnnnnnnnnnnnnnnnnnnnnnnnnnnnnnnnnnnnnnnnnnnnnnnnnnnnnnnnnnnnnnnnnnnnnnnnnnnnnnnnnnnnnnnnnnnnnnnnnnnnnnnnnnnnnnnnnnnnnnnnnnnnnnnnnnnnnnnnnnnnnnnnnnnnnnnnnnnnnnnnnnnnnnnnnnnnnnnnnnnnnnnnnnnnnnnnnnnnnnnnnnnnnnnnnnnnnnnnnnnnnnnnnnnnnnnnnnnnnnnnnnnnnnnnnnnnnnnnnnnnnnnnnnnnnnnnnnnnnnnnnnnnnnnnnnnnnnnnnnnnnnnnnnnnnnnnnnnnnnnnnnnnnnnnnnnnnnnnnnnnnnnnnnnnnnnnnnnnnnnnnnnnnnnnnnnnnnnnnnnnnnnnnnnnnnnnnnnnnnnnnnnnnnnnnnnnnnnnnnnnnnnnnnnnnnnnnnnnnnnnnnnnnnnnnnnnnnnnnnnnnnnnnnnnnnnnnnnnnnnnnnnnnnnnnnnnnnnnnnnnnnnnnnnnnnnnnnnnnnnnnnnnnnnnnnnnnnnnnnnnnnnnnnnnnnnnnnnnnnnnnnnnnnnnnnnnnnnnnnnnnnnnnnnnnnnnnnnnnnnnnnnnnnnnnnnnnnnnnnnnnnnnnnnnnnnnnnnnnnnnnnnnnnnnnnnnnnnnnnnnnnnnnnnnnnnnnnnnnnnnnnnnnnnnnnnnnnnnnnnnnnnnnnnnnnnnnnnnnnnnnnnnnnnnnnnnnnnnnnnnnnnnnnnnnnnnnnnnnnnnnnnnnnnnnnnnnnnnnnnnnnnnnnnnnnnnnnnnnnnnnnnnnnnnnnnnnnnnnnnnnnnnnnnnnnnnnnnnnnnnnnnnnnnnnnnnnnnnnnnnnnnnnnnnnnnnnnnnnnnnnnnnnnnnnnnnnnnnnnnnnnnnnnnnnnnnnnnnnnnnnnnnnnnnnnnnnnnnnnnnnnnnnnnnnnnnnnnnnnnnnnnnnnnnnnnnnnnnnnnnnnnnnnnnnnnnnnnnnnnnnnnnnnnnnnnnnnnnnnnnnnnnnnnnnnnnnnnnnnnnnnnnnnnnnnnnnnnnnnnnnnnnnnnnnnnnnnnnnnnnnnnnnnnnnnnnnnnnnnnnnnnnnnnnnnnnnnnnnnnnnnnnnnnnnnnnnnnnnnnnnnnnnnnnnnnnnnnnnnnnnnnnnnnnnnnnnnnnnnnnnnnnnnnnnnnnnnnnnnnnnnnnnnnnnnnnnnnnnnnnnnnnnnnnnnnnnnnnnnnnnnnnnnnnnnnnnnnnnnnnnnnnnnnnnnnnnnnnnnnnnnnnnnnnnnnnnnnnnnnnnnnnnnnnnnnnnnnnnnnnnnnnnnnnnnnnnnnnnnnnnnnnnnnnnnnnnnnnnnnnnnnnnnnnnnnnnnnnnnnnnnnnnnnnnnnnnnnnnnnnnnnnnnnnnnnnnnnnnnnnnnnnnnnnnnnnnnnnnnnnnnnnnnnnnnnnnnnnnnnnnnnnnnnnnnnnnnnnnnnnnnnnnnnnnnnnnnnnnnnnnnnnnnnnnnnnnnnnnnnnnnnnnnnnnnnnnnnnnnnnnnnnnnnnnnnnnnnnnnnnnnnnnnnnnnnnnnnnnnnnnnnnnnnnnnnnnnnnnnnnnnnnnnnnnnnnnnnnnnnnnnnnnnnnnnnnnnnnnnnnnnnnnnnnnnnnnnnnnnnnnnnnnnnnnnnnnnnnnnnnnnnnnnnnnnnnnnnnnnnnnnnnnnnnnnnnnnnnnnnnnnnnnnnnnnnnnnnnnnnnnnnnnnnnnnnnnnnnnnnnnnnnnnnnnnnnnnnnnnnnnnnnnnnnnnnnnnnnnnnnnnnnnnnnnnnnnnnnnnnnnnnnnnnnnnnnnnnnnnnnnnnnnnnnnnnnnnnnnnnnnnnnnnnnnnnnnnnnnnnnnnnnnnnnnnnnnnnnnnnnnnnnnnnnnnnnnnnnnnnnnnnnnnnnnnnnnnnnnnnnnnnnnnnnnnnnnnnnnnnnnnnnnnnnnnnnnnnnnnnnnnnnnnnnnnnnnnnnnnnnnnnnnnnnnnnnnnnnnnnnnnnnnnnnnnnnnnnnnnnnnnnnnnnnnnnnnnnnnnnnnnnnnnnnnnnnnnnnnnnnnnnnnnnnnnnnnnnnnnnnnnnnnnnnnnnnnnnnnnnnnnnnnnnnnnnnnnnnnnnnnnnnnnnnnnnnnnnnnnnnnnnnnnnnnnnnnnnnnnnnnnnnnnnnnnnnnnnnnnnnnnnnnnnnnnnnnnnnnnnnnnnnnnnnnnnnnnnnnnnnnnnnnnnnnnnnnnnnnnnnnnnnnnnnnnnnnnnnnnnnnnnnnnnnnnnnnnnnnnnnnnnnnnnnnnnnnnnnnnnnnnnnnnnnnnnnnnnnnnnnnnnnnnnnnnnnnnnnnnnnnnnnnnnnnnnnnnnnnnnnnnnnnnnnnnnnnnnnnnnnnnnnnnnnnnnnnnnnnnnnnnnnnnnnnnnnnnnnnnnnnnnnnnnnnnnnnnnnnnnnnnnnnnnnnnnnnnnnnnnnnnnnnnnnnnnnnnnnnnnnnnnnnnnnnnnnnnnnnnnnnnnnnnnnnnnnnnnnnnnnnnnnnnnnnnnnnnnnnnnnnnnnnnnnnnnnnnnnnnnnnnnnnnnnnnnnnnnnnnnnnnnnnnnnnnnnnnnnnnnnnnnnnnnnnnnnnnnnnnnnnnnnnnnnnnnnnnnnnnnnnnnnnnnnnnnnnnnnnnnnnnnnnnnnnnnnnnnnnnnnnnnnnnnnnnnnnnnnnnnnnnnnnnnnnnnnnnnnnnnnnnnnnnnnnnnnnnnnnnnnnnnnnnnnnnnnnnnnnnnnnnnnnnnnnnnnnnnnnnnnnnnnnnnnnnnnnnnnnnnnnnnnnnnnnnnnnnnnnnnnnnnnnnnnnnnnnnnnnnnnnnnnnnnnnnnnnnnnnnnnnnnnnnnnnnnnnnnnnnnnnnnnnnnnnnnnnnnnnnnnnnnnnnnnnnnnnnnnnnnnnnnnnnnnnnnnnnnnnnnnnnnnnnnnnnnnnnnnnnnnnnnnnnnnnnnnnnnnnnnnnnnnnnnnnnnnnnnnnnnnnnnnnnnnnnnnnnnnnnnnnnnnnnnnnnnnnnnnnnnnnnnnnnnnnnnnnnnnnnnnnnnnnnnnnnnnnnnnnnnnnnnnnnnnnnnnnnnnnnnnnnnnnnnnnnnnnnnnnnnnnnnnnnnnnnnnnnnnnnnnnnnnnnnnnnnnnnnnnnnnnnnnnnnnnnnnnnnnnnnnnnnnnnnnnnnnnnnnnnnnnnnnnnnnnnnnnnnnnnnnnnnnnnnnnnnnnnnnnnnnnnnnnnnnnnnnnnnnnnnnnnnnnnnnnnnnnnnnnnnnnnnnnnnnnnnnnnnnnnnnnnnnnnnnnnnnnnnnnnnnnnnnnnnnnnnnnnnnnnnnnnnnnnnnnnnnnnnnnnnnnnnnnnnnnnnnnnnnnnnnnnnnnnnnnnnnnnnnnnnnnnnnnnnnnnnnnnnnnnnnnnnnnnnnnnnnnnnnnnnnnnnnnnnnnnnnnnnnnnnnnnnnnnnnnnnnnnnnnnnnnnnnnnnnnnnnnnnnnnnnnnnnnnnnnnnnnnnnnnnnnnnnnnnnnnnnnnnnnnnnnnnnnnnnnnnnnnnnnnnnnnnnnnnnnnnnnnnnnnnnnnnnnnnnnnnnnnnnnnnnnnnnnnnnnnnnnnnnnnnnnnnnnnnnnnnnnnnnnnnnnnnnnnnnnnnnnnnnnnnnnnnnnnnnnnnnnnnnnnnnnnnnnnnnnnnnnnnnnnnnnnnnnnnnnnnnnnnnnnnnnnnnnnnnnnnnnnnnnnnnnnnnnnnnnnnnnnnnnnnnnnnnnnnnnnnnnnnnnnnnnnnnnnnnnnnnnnnnnnnnnnnnnnnnnnnnnnnnnnnnnnnnnnnnnnnnnnnnnnnnnnnnnnnnnnnnnnnnnnnnnnnnnnnnnnnnnnnnnnnnnnnnnnnnnnnnnnnnnnnnnnnnnnnnnnnnnnnnnnnnnnnnnnnnnnnnnnnnnnnnnnnnnnnnnnnnnnnnnnnnnnnnnnnnnnnnnnnnnnnnnnnnnnnnnnnnnnnnnnnnnnnnnnnnnnnnnnnnnnnnnnnnnnnnnnnnnnnnnnnnnnnnnnnnnnnnnnnnnnnnnnnnnnnnnnnnnnnnnnnnnnnnnnnnnnnnnnnnnnnnnnnnnnnnnnnnnnnnnnnnnnnnnnnnnnnnnnnnnnnnnnnnnnnnnnnnnnnnnnnnnnnnnnnnnnnnnnnnnnnnnnnnnnnnnnnnnnnnnnnnnnnnnnnnnnnnnnnnnnnnnnnnnnnnnnnnnnnnnnnnnnnnnnnnnnnnnnnnnnnnnnnnnnnnnnnnnnnnnnnnnnnnnnnnnnnnnnnnnnnnnnnnnnnnnnnnnnnnnnnnnnnnnnnnnnnnnnnnnnnnnnnnnnnnnnnnnnnnnnnnnnnnnnnnnnnnnnnnnnnnnnnnnnnnnnnnnnnnnnnnnnnnnnnnnnnnnnnnnnnnnnnnnnnnnnnnnnnnnnnnnnnnnnnnnnnnnnnnnnnnnnnnnnnnnnnnnnnnnnnnnnnnnnnnnnnnnnnnnnnnnnnnnnnnnnnnnnnnnnnnnnnnnnnnnnnnnnnnnnnnnnnnnnnnnnnnnnnnnnnnnnnnnnnnnnnnnnnnnnnnnnnnnnnnnnnnnnnnnnnnnnnnnnnnnnnnnnnnnnnnnnnnnnnnnnnnnnnnnnnnnnnnnnnnnnnnnnnnnnnnnnnnnnnnnnnnnnnnnnnnnnnnnnnnnnnnnnnnnnnnnnnnnnnnnnnnnnnnnnnnnnnnnnnnnnnnnnnnnnnnnnnnnnnnnnnnnnnnnnnnnnnnnnnnnnnnnnnnnnnnnnnnnnnnnnnnnnnnnnnnnnnnnnnnnnnnnnnnnnnnnnnnnnnnnnnnnnnnnnnnnnnnnnnnnnnnnnnnnnnnnnnnnnnnnnnnnnnnnnnnnnnnnnnnnnnnnnnnnnnnnnnnnnnnnnnnnnnnnnnnnnnnnnnnnnnnnnnnnnnnnnnnnnnnnnnnnnnnnnnnnnnnnnnnnnnnnnnnnnnnnnnnnnnnnnnnnnnnnnnnnnnnnnnnnnnnnnnnnnnnnnnnnnnnnnnnnnnnnnnnnnnnnnnnnnnnnnnnnnnnnnnnnnnnnnnnnnnnnnnnnnnnnnnnnnnnnnnnnnnnnnnnnnnnnnnnnnnnnnnnnnnnnnnnnnnnnnnnnnnnnnnnnnnnnnnnnnnnnnnnnnnnnnnnnnnnnnnnnnnnnnnnnnnnnnnnnnnnnnnnnnnnnnnnnnnnnnnnnnnnnnnnnnnnnnnnnnnnnnnnnnnnnnnnnnnnnnnnnnnnnnnnnnnnnnnnnnnnnnnnnnnnnnnnnnnnnnnnnnnnnnnnnnnnnnnnnnnnnnnnnnnnnnnnnnnnnnnnnnnnnnnnnnnnnnnnnnnnnnnnnnnnnnnnnnnnnnnnnnnnnnnnnnnnnnnnnnnnnnnnnnnnnnnnnnnnnnnnnnnnnnnnnnnnnnnnnnnnnnnnnnnnnnnnnnnnnnnnnnnnnnnnnnnnnnnnnnnnnnnnnnnnnnnnnnnnnnnnnnnnnnnnnnnnnnnnnnnnnnnnnnnnnnnnnnnnnnnnnnnnnnnnnnnnnnnnnnnnnnnnnnnnnnnnnnnnnnnnnnnnnnnnnnnnnnnnnnnnnnnnnnnnnnnnnnnnnnnnnnnnnnnnnnnnnnnnnnnnnnnnnnnnnnnnnnnnnnnnnnnnnnnnnnnnnnnnnnnnnnnnnnnnnnnnnnnnnnnnnnnnnnnnnnnnnnnnnnnnnnnnnnnnnnnnnnnnnnnnnnnnnnnnnnnnnnnnnnnnnnnnnnnnnnnnnnnnnnnnnnnnnnnnnnnnnnnnnnnnnnnnnnnnnnnnnnnnnnnnnnnnnnnnnnnnnnnnnnnnnnnnnnnnnnnnnnnnnnnnnnnnnnnnnnnnnnnnnnnnnnnnnnnnnnnnnnnnnnnnnnnnnnnnnnnnnnnnnnnnnnnnnnnnnnnnnnnnnnnnnnnnnnnnnnnnnnnnnnnnnnnnnnnnnnnnnnnnnnnnnnnnnnnnnnnnnnnnnnnnnnnnnnnnnnnnnnnnnnnnnnnnnnnnnnnnnnnnnnnnnnnnnnnnnnnnnnnnnnnnnnnnnnnnnnnnnnnnnnnnnnnnnnnnnnnnnnnnnnnnnnnnnnnnnnnnnnnnnnnnnnnnnnnnnnnnnnnnnnnnnnnnnnnnnnnnnnnnnnnnnnnnnnnnnnnnnnnnnnnnnnnnnnnnnnnnnnnnnnnnnnnnnnnnnnnnnnnnnnnnnnnnnnnnnnnnnnnnnnnnnnnnnnnnnnnnnnnnnnnnnnnnnnnnnnnnnnnnnnnnnnnnnnnnnnnnnnnnnnnnnnnnnnnnnnnnnnnnnnnnnnnnnnnnnnnnnnnnnnnnnnnnnnnnnnnnnnnnnnnnnnnnnnnnnnnnnnnnnnnnnnnnnnnnnnnnnnnnnnnnnnnnnnnnnnnnnnnnnnnnnnnnnnnnnnnnnnnnnnnnnnnnnnnnnnnnnnnnnnnnnnnnnnnnnnnnnnnnnnnnnnnnnnnnnnnnnnnnnnnnnnnnnnnnnnnnnnnnnnnnnnnnnnnnnnnnnnnnnnnnnnnnnnnnnnnnnnnnnnnnnnnnnnnnnnnnnnnnnnnnnnnnnnnnnnnnnnnnnnnnnnnnnnnnnnnnnnnnnnnnnnnnnnnnnnnnnnnnnnnnnnnnnnnnnnnnnnnnnnnnnnnnnnnnnnnnnnnnnnnnnnnnnnnnnnnnnnnnnnnnnnnnnnnnnnnnnnnnnnnnnnnnnnnnnnnnnnnnnnnnnnnnnnnnnnnnnnnnnnnnnnnnnnnnnnnnnnnnnnnnnnnnnnnnnnnnnnnnnnnnnnnnnnnnnnnnnnnnnnnnnnnnnnnnnnnnnnnnnnnnnnnnnnnnnnnnnnnnnnnnnnnnnnnnnnnnnnnnnnnnnnnnnnnnnnnnnnnnnnnnnnnnnnnnnnnnnnnnnnnnnnnnnnnnnnnnnnnnnnnnnnnnnnnnnnnnnnnnnnnnnnnnnnnnnnnnnnnnnnnnnnnnnnnnnnnnnnnnnnnnnnnnnnnnnnnnnnnnnnnnnnnnnnnnnnnnnnnnnnnnnnnnnnnnnnnnnnnnnnnnnnnnnnnnnnnnnnnnnnnnnnnnnnnnnnnnnnnnnnnnnnnnnnnnnnnnnnnnnnnnnnnnnnnnnnnnnnnnnnnnnnnnnnnnnnnnnnnnnnnnnnnnnnnnnnnnnnnnnnnnnnnnnnnnnnnnnnnnnnnnnnnnnnnnnnnnnnnnnnnnnnnnnnnnnnnnnnnnnnnnnnnnnnnnnnnnnnnnnnnnnnnnnnnnnnnnnnnnnnnnnnnnnnnnnnnnnnnnnnnnnnnnnnnnnnnnnnnnnnnnnnnnnnnnnnnnnnnnnnnnnnnnnnnnnnnnnnnnnnnnnnnnnnnnnnnnnnnnnnnnnnnnnnnnnnnnnnnnnnnnnnnnnnnnnnnnnnnnnnnnnnnnnnnnnnnnnnnnnnnnnnnnnnnnnnnnnnnnnnnnnnnnnnnnnnnnnnnnnnnnnnnnnnnnnnnnnnnnnnnnnnnnnnnnnnnnnnnnnnnnnnnnnnnnnnnnnnnnnnnnnnnnnnnnnnnnnnnnnnnnnnnnnnnnnnnnnnnnnnnnnnnnnnnnnnnnnnnnnnnnnnnnnnnnnnnnnnnnnnnnnnnnnnnnnnnnnnnnnnnnnnnnnnnnnnnnnnnnnnnnnnnnnnnnnnnnnnnnnnnnnnnnnnnnnnnnnnnnnnnnnnnnnnnnnnnnnnnnnnnnnnnnnnnnnnnnnnnnnnnnnnnnnnnnnnnnnnnnnnnnnnnnnnnnnnnnnnnnnnnnnnnnnnnnnnnnnnnnnnnnnnnnnnnnnnnnnnnnnnnnnnnnnnnnnnnnnnnnnnnnnnnnnnnnnnnnnnnnnnnnnnnnnnnnnnnnnnnnnnnnnnnnnnnnnnnnnnnnnnnnnnnnnnnnnnnnnnnnnnnnnnnnnnnnnnnnnnnnnnnnnnnnnnnnnnnnnnnnnnnnnnnnnnnnnnnnnnnnnnnnnnnnnnnnnnnnnnnnnnnnnnnnnnnnnnnnnnnnnnnnnnnnnnnnnnnnnnnnnnnnnnnnnnnnnnnnnnnnnnnnnnnnnnnnnnnnnnnnnnnnnnnnnnnnnnnnnnnnnnnnnnnnnnnnnnnnnnnnnnnnnnnnnnnnnnnnnnnnnnnnnnnnnnnnnnnnnnnnnnnnnnnnnnnnnnnnnnnnnnnnnnnnnnnnnnnnnnnnnnnnnnnnnnnnnnnnnnnnnnnnnnnnnnnnnnnnnnnnnnnnnnnnnnnnnnnnnnnnnnnnnnnnnnnnnnnnnnnnnnnnnnnnnnnnnnnnnnnnnnnnnnnnnnnnnnnnnnnnnnnnnnnnnnnnnnnnnnnnnnnnnnnnnnnnnnnnnnnnnnnnnnnnnnnnnnnnnnnnnnnnnnnnnnnnnnnnnnnnnnnnnnnnnnnnnnnnnnnnnnnnnnnnnnnnnnnnnnnnnnnnnnnnnnnnnnnnnnnnnnnnnnnnnnnnnnnnnnnnnnnnnnnnnnnnnnnnnnnnnnnnnnnnnnnnnnnnnnnnnnnnnnnnnnnnnnnnnnnnnnnnnnnnnnnnnnnnnnnnnnnnnnnnnnnnnnnnnnnnnnnnnnnnnnnnnnnnnnnnnnnnnnnnnnnnnnnnnnnnnnnnnnnnnnnnnnnnnnnnnnnnnnnnnnnnnnnnnnnnnnnnnnnnnnnnnnnnnnnnnnnnnnnnnnnnnnnnnnnnnnnnnnnnnnnnnnnnnnnnnnnnnnnnnnnnnnnnnnnnnnnnnnnnnnnnnnnnnnnnnnnnnnnnnnnnnnnnnnnnnnnnnnnnnnnnnnnnnnnnnnnnnnnnnnnnnnnnnnnnnnnnnnnnnnnnnnnnnnnnnnnnnnnnnnnnnnnnnnnnnnnnnnnnnnnnnnnnnnnnnnnnnnnnnnnnnnnnnnnnnnnnnnnnnnnnnnnnnnnnnnnnnnnnnnnnnnnnnnnnnnnnnnnnnnnnnnnnnnnnnnnnnnnnnnnnnnnnnnnnnnnnnnnnnnnnnnnnnnnnnnnnnnnnnnnnnnnnnnnnnnnnnnnnnnnnnnnnnnnnnnnnnnnnnnnnnnnnnnnnnnnnnnnnnnnnnnnnnnnnnnnnnnnnnnnnnnnnnnnnnnnnnnnnnnnnnnnnnnnnnnnnnnnnnnnnnnnnnnnnnnnnnnnnnnnnnnnnnnnnnnnnnnnnnnnnnnnnnnnnnnnnnnnnnnnnnnnnnnnnnnnnnnnnnnnnnnnnnnnnnnnnnnnnnnnnnnnnnnnnnnnnnnnnnnnnnnnnnnnnnnnnnnnnnnnnnnnnnnnnnnnnnnnnnnnnnnnnnnnnnnnnnnnnnnnnnnnnnnnnnnnnnnnnnnnnnnnnnnnnnnnnnnnnnnnnnnnnnnnnnnnnnnnnnnnnnnnnnnnnnnnnnnnnnnnnnnnnnnnnnnnnnnnnnnnnnnnnnnnnnnnnnnnnnnnnnnnnnnnnnnnnnnnnnnnnnnnnnnnnnnnnnnnnnnnnnnnnnnnnnnnnnnnnnnnnnnnnnnnnnnnnnnnnnnnnnnnnnnnnnnnnnnnnnnnnnnnnnnnnnnnnnnnnnnnnnnnnnnnnnnnnnnnnnnnnnnnnnnnnnnnnnnnnnnnnnnnnnnnnnnnnnnnnnnnnnnnnnnnnnnnnnnnnnnnnnnnnnnnnnnnnnnnnnnnnnnnnnnnnnnnnnnnnnnnnnnnnnnnnnnnnnnnnnnnnnnnnnnnnnnnnnnnnnnnnnnnnnnnnnnnnnnnnnnnnnnnnnnnnnnnnnnnnnnnnnnnnnnnnnnnnnnnnnnnnnnnnnnnnnnnnnnnnnnnnnnnnnnnnnnnnnnnnnnnnnnnnnnnnnnnnnnnnnnnnnnnnnnnnnnnnnnnnnnnnnnnnnnnnnnnnnnnnnnnnnnnnnnnnnnnnnnnnnnnnnnnnnnnnnnnnnnnnnnnnnnnnnnnnnnnnnnnnnnnnnnnnnnnnnnnnnnnnnnnnnnnnnnnnnnnnnnnnnnnnnnnnnnnnnnnnnnnnnnnnnnnnnnnnnnnnnnnnnnnnnnnnnnnnnnnnnnnnnnnnnnnnnnnnnnnnnnnnnnnnnnnnnnnnnnnnnnnnnnnnnnnnnnnnnnnnnnnnnnnnnnnnnnnnnnnnnnnnnnnnnnnnnnnnnnnnnnnnnnnnnnnnnnnnnnnnnnnnnnnnnnnnnnnnnnnnnnnnnnnnnnnnnnnnnnnnnnnnnnnnnnnnnnnnnnnnnnnnnnnnnnnnnnnnnnnnnnnnnnnnnnnnnnnnnnnnnnnnnnnnnnnnnnnnnnnnnnnnnnnnnnnnnnnnnnnnnnnnnnnnnnnnnnnnnnnnnnnnnnnnnnnnnnnnnnnnnnnnnnnnnnnnnnnnnnnnnnnnnnnnnnnnnnnnnnnnnnnnnnnnnnnnnnnnnnnnnnnnnnnnnnnnnnnnnnnnnnnnnnnnnnnnnnnnnnnnnnnnnnnnnnnnnnnnnnnnnnnnnnnnnnnnnnnnnnnnnnnnnnnnnnnnnnnnnnnnnnnnnnnnnnnnnnnnnnnnnnnnnnnnnnnnnnnnnnnnnnnnnnnnnnnnnnnnnnnnnnnnnnnnnnnnnnnnnnnnnnnnnnnnnnnnnnnnnnnnnnnnnnnnnnnnnnnnnnnnnnnnnnnnnnnnnnnnnnnnnnnnnnnnnnnnnnnnnnnnnnnnnnnnnnnnnnnnnnnnnnnnnnnnnnnnnnnnnnnnnnnnnnnnnnnnnnnnnnnnnnnnnnnnnnnnnnnnnnnnnnnnnnnnnnnnnnnnnnnnnnnnnnnnnnnnnnnnnnnnnnnnnnnnnnnnnnnnnnnnnnnnnnnnnnnnnnnnnnnnnnnnnnnnnnnnnnnnnnnnnnnnnnnnnnnnnnnnnnnnnnnnnnnnnnnnnnnnnnnnnnnnnnnnnnnnnnnnnnnnnnnnnnnnnnnnnnnnnnnnnnnnnnnnnnnnnnnnnnnnnnnnnnnnnnnnnnnnnnnnnnnnnnnnnnnnnnnnnnnnnnnnnnnnnnnnnnnnnnnnnnnnnnnnnnnnnnnnnnnnnnnnnnnnnnnnnnnnnnnnnnnnnnnnnnnnnnnnnnnnnnnnnnnnnnnnnnnnnnnnnnnnnnnnnnnnnnnnnnnnnnnnnnnnnnnnnnnnnnnnnnnnnnnnnnnnnnnnnnnnnnnnnnnnnnnnnnnnnnnnnnnnnnnnnnnnnnnnnnnnnnnnnnnnnnnnnnnnnnnnnnnnnnnnnnnnnnnnnnnnnnnnnnnnnnnnnnnnnnnnnnnnnnnnnnnnnnnnnnnnnnnnnnnnnnnnnnnnnnnnnnnnnnnnnnnnnnnnnnnnnnnnnnnnnnnnnnnnnnnnnnnnnnnnnnnnnnnnnnnnnnnnnnnnnnnnnnnnnnnnnnnnnnnnnnnnnnnnnnnnnnnnnnnnnnnnnnnnnnnnnnnnnnnnnnnnnnnnnnnnnnnnnnnnnnnnnnnnnnnnnnnnnnnnnnnnnnnnnnnnnnnnnnnnnnnnnnnnnnnnnnnnnnnnnnnnnnnnnnnnnnnnnnnnnnnnnnnnnnnnnnnnnnnnnnnnnnnnnnnnnnnnnnnnnnnnnnnnnnnnnnnnnnnnnnnnnnnnnnnnnnnnnnnnnnnnnnnnnnnnnnnnnnnnnnnnnnnnnnnnnnnnnnnnnnnnnnnnnnnnnnnnnnnnnnnnnnnnnnnnnnnnnnnnnnnnnnnnnnnnnnnnnnnnnnnnnnnnnnnnnnnnnnnnnnnnnnnnnnnnnnnnnnnnnnnnnnnnnnnnnnnnnnnnnnnnnnnnnnnnnnnnnnnnnnnnnnnnnnnnnnnnnnnnnnnnnnnnnnnnnnnnnnnnnnnnnnnnnnnnnnnnnnnnnnnnnnnnnnnnnnnnnnnnnnnnnnnnnnnnnnnnnnnnnnnnnnnnnnnnnnnnnnnnnnnnnnnnnnnnnnnnnnnnnnnnnnnnnnnnnnnnnnnnnnnnnnnnnnnnnnnnnnnnnnnnnnnnnnnnnnnnnnnnnnnnnnnnnnnnnnnnnnnnnnnnnnnnnnnnnnnnnnnnnnnnnnnnnnnnnnnnnnnnnnnnnnnnnnnnnnnnnnnnnnnnnnnnnnnnnnnnnnnnnnnnnnnnnnnnnnnnnnnnnnnnnnnnnnnnnnnnnnnnnnnnnnnnnnnnnnnnnnnnnnnnnnnnnnnnnnnnnnnnnnnnnnnnnnnnnnnnnnnnnnnnnnnnnnnnnnnnnnnnnnnnnnnnnnnnnnnnnnnnnnnnnnnnnnnnnnnnnnnnnnnnnnnnnnnnnnnnnnnnnnnnnnnnnnnnnnnnnnnnnnnnnnnnnnnnnnnnnnnnnnnnnnnnnnnnnnnnnnnnnnnnnnnnnnnnnnnnnnnnnnnnnnnnnnnnnnnnnnnnnnnnnnnnnnnnnnnnnnnnnnnnnnnnnnnnnnnnnnnnnnnnnnnnnnnnnnnnnnnnnnnnnnnnnnnnnnnnnnnnnnnnnnnnnnnnnnnnnnnnnnnnnnnnnnnnnnnnnnnnnnnnnnnnnnnnnnnnnnnnnnnnnnnnnnnnnnnnnnnnnnnnnnnnnnnnnnnnnnnnnnnnnnnnnnnnnnnnnnnnnnnnnnnnnnnnnnnnnnnnnnnnnnnnnnnnnnnnnnnnnnnnnnnnnnnnnnnnnnnnnnnnnnnnnnnnnnnnnnnnnnnnnnnnnnnnnnnnnnnnnnnnnnnnnnnnnnnnnnnnnnnnnnnnnnnnnnnnnnnnnnnnnnnnnnnnnnnnnnnnnnnnnnnnnnnnnnnnnnnnnnnnnnnnnnnnnnnnnnnnnnnnnnnnnnnnnnnnnnnnnnnnnnnnnnnnnnnnnnnnnnnnnnnnnnnnnnnnnnnnnnnnnnnnnnnnnnnnnnnnnnnnnnnnnnnnnnnnnnnnnnnnnnnnnnnnnnnnnnnnnnnnnnnnnnnnnnnnnnnnnnnnnnnnnnnnnnnnnnnnnnnnnnnnnnnnnnnnnnnnnnnnnnnnnnnnnnnnnnnnnnnnnnnnnnnnnnnnnnnnnnnnnnnnnnnnnnnnnnnnnnnnnnnnnnnnnnnnnnnnnnnnnnnnnnnnnnnnnnnnnnnnnnnnnnnnnnnnnnnnnnnnnnnnnnnnnnnnnnnnnnnnnnnnnnnnnnnnnnnnnnnnnnnnnnnnnnnnnnnnnnnnnnnnnnnnnnnnnnnnnnnnnnnnnnnnnnnnnnnnnnnnnnnnnnnnnnnnnnnnnnnnnnnnnnnnnnnnnnnnnnnnnnnnnnnnnnnnnnnnnnnnnnnnnnnnnnnnnnnnnnnnnnnnnnnnnnnnnnnnnnnnnnnnnnnnnnnnnnnnnnnnnnnnnnnnnnnnnnnnnnnnnnnnnnnnnnnnnnnnnnnnnnnnnnnnnnnnnnnnnnnnnnnnnnnnnnnnnnnnnnnnnnnnnnnnnnnnnnnnnnnnnnnnnnnnnnnnnnnnnnnnnnnnnnnnnnnnnnnnnnnnnnnnnnnnnnnnnnnnnnnnnnnnnnnnnnnnnnnnnnnnnnnnnnnnnnnnnnnnnnnnnnnnnnnnnnnnnnnnnnnnnnnnnnnnnnnnnnnnnnnnnnnnnnnnnnnnnnnnnnnnnnnnnnnnnnnnnnnnnnnnnnnnnnnnnnnnnnnnnnnnnnnnnnnnnnnnnnnnnnnnnnnnnnnnnnnnnnnnnnnnnnnnnnnnnnnnnnnnnnnnnnnnnnnnnnnnnnnnnnnnnnnnnnnnnnnnnnnnnnnnnnnnnnnnnnnnnnnnnnnnnnnnnnnnnnnnnnnnnnnnnnnnnnnnnnnnnnnnnnnnnnnnnnnnnnnnnnnnnnnnnnnnnnnnnnnnnnnnnnnnnnnnnnnnnnnnnnnnnnnnnnnnnnnnnnnnnnnnnnnnnnnnnnnnnnnnnnnnnnnnnnnnnnnnnnnnnnnnnnnnnnnnnnnnnnnnnnnnnnnnnnnnnnnnnnnnnnnnnnnnnnnnnnnnnnnnnnnnnnnnnnnnnnnnnnnnnnnnnnnnnnnnnnnnnnnnnnnnnnnnnnnnnnnnnnnnnnnnnnnnnnnnnnnnnnnnnnnnnnnnnnnnnnnnnnnnnnnnnnnnnnnnnnnnnnnnnnnnnnnnnnnnnnnnnnnnnnnnnnnnnnnnnnnnnnnnnnnnnnnnnnnnnnnnnnnnnnnnnnnnnnnnnnnnnnnnnnnnnnnnnnnnnnnnnnnnnnnnnnnnnnnnnnnnnnnnnnnnnnnnnnnnnnnnnnnnnnnnnnnnnnnnnnnnnnnnnnnnnnnnnnnnnnnnnnnnnnnnnnnnnnnnnnnnnnnnnnnnnnnnnnnnnnnnnnnnnnnnnnnnnnnnnnnnnnnnnnnnnnnnnnnnnnnnnnnnnnnnnnnnnnnnnnnnnnnnnnnnnnnnnnnnnnnnnnnnnnnnnnnnnnnnnnnnnnnnnnnnnnnnnnnnnnnnnnnnnnnnnnnnnnnnnnnnnnnnnnnnnnnnnnnnnnnnnnnnnnnnnnnnnnnnnnnnnnnnnnnnnnnnnnnnnnnnnnnnnnnnnnnnnnnnnnnnnnnnnnnnnnnnnnnnnnnnnnnnnnnnnnnnnnnnnnnnnnnnnnnnnnnnnnnnnnnnnnnnnnnnnnnnnnnnnnnnnnnnnnnnnnnnnnnnnnnnnnnnnnnnnnnnnnnnnnnnnnnnnnnnnnnnnnnnnnnnnnnnnnnnnnnnnnnnnnnnnnnnnnnnnnnnnnnnnnnnnnnnnnnnnnnnnnnnnnnnnnnnnnnnnnnnnnnnnnnnnnnnnnnnnnnnnnnnnnnnnnnnnnnnnnnnnnnnnnnnnnnnnnnnnnnnnnnnnnnnnnnnnnnnnnnnnnnnnnnnnnnnnnnnnnnnnnnnnnnnnnnnnnnnnnnnnnnnnnnnnnnnnnnnnnnnnnnnnnnnnnnnnnnnnnnnnnnnnnnnnnnnnnnnnnnnnnnnnnnnnnnnnnnnnnnnnnnnnnnnnnnnnnnnnnnnnnnnnnnnnnnnnnnnnnnnnnnnnnnnnnnnnnnnnnnnnnnnnnnnnnnnnnnnnnnnnnnnnnnnnnnnnnnnnnnnnnnnnnnnnnnnnnnnnnnnnnnnnnnnnnnnnnnnnnnnnnnnnnnnnnnnnnnnnnnnnnnnnnnnnnnnnnnnnnnnnnnnnnnnnnnnnnnnnnnnnnnnnnnnnnnnnnnnnnnnnnnnnnnnnnnnnnnnnnnnnnnnnnnnnnnnnnnnnnnnnnnnnnnnnnnnnnnnnnnnnnnnnnnnnnnnnnnnnnnnnnnnnnnnnnnnnnnnnnnnnnnnnnnnnnnnnnnnnnnnnnnnnnnnnnnnnnnnnnnnnnnnnnnnnnnnnnnnnnnnnnnnnnnnnnnnnnnnnnnnnnnnnnnnnnnnnnnnnnnnnnnnnnnnnnnnnnnnnnnnnnnnnnnnnnnnnnnnnnnnnnnnnnnnnnnnnnnnnnnnnnnnnnnnnnnnnnnnnnnnnnnnnnnnnnnnnnnnnnnnnnnnnnnnnnnnnnnnnnnnnnnnnnnnnnnnnnnnnnnnnnnnnnnnnnnnnnnnnnnnnnnnnnnnnnnnnnnnnnnnnnnnnnnnnnnnnnnnnnnnnnnnnnnnnnnnnnnnnnnnnnnnnnnnnnnnnnnnnnnnnnnnnnnnnnnnnnnnnnnnnnnnnnnnnnnnnnnnnnnnnnnnnnnnnnnnnnnnnnnnnnnnnnnnnnnnnnnnnnnnnnnnnnnnnnnnnnnnnnnnnnnnnnnnnnnnnnnnnnnnnnnnnnnnnnnnnnnnnnnnnnnnnnnnnnnnnnnnnnnnnnnnnnnnnnnnnnnnnnnnnnnnnnnnnnnnnnnnnnnnnnnnnnnnnnnnnnnnnnnnnnnnnnnnnnnnnnnnnnnnnnnnnnnnnnnnnnnnnnnnnnnnnnnnnnnnnnnnnnnnnnnnnnnnnnnnnnnnnnnnnnnnnnnnnnnnnnnnnnnnnnnnnnnnnnnnnnnnnnnnnnnnnnnnnnnnnnnnnnnnnnnnnnnnnnnnnnnnnnnnnnnnnnnnnnnnnnnnnnnnnnnnnnnnnnnnnnnnnnnnnnnnnnnnnnnnnnnnnnnnnnnnnnnnnnnnnnnnnnnnnnnnnnnnnnnnnnnnnnnnnnnnnnnnnnnnnnnnnnnnnnnnnnnnnnnnnnnnnnnnnnnnnnnnnnnnnnnnnnnnnnnnnnnnnnnnnnnnnnnnnnnnnnnnnnnnnnnnnnnnnnnnnnnnnnnnnnnnnnnnnnnnnnnnnnnnnnnnnnnnnnnnnnnnnnnnnnnnnnnnnnnnnnnnnnnnnnnnnnnnnnnnnnnnnnnnnnnnnnnnnnnnnnnnnnnnnnnnnnnnnnnnnnnnnnnnnnnnnnnnnnnnnnnnnnnnnnnnnnnnnnnnnnnnnnnnnnnnnnnnnnnnnnnnnnnnnnnnnnnnnnnnnnnnnnnnnnnnnnnnnnnnnnnnnnnnnnnnnnnnnnnnnnnnnnnnnnnnnnnnnnnnnnnnnnnnnnnnnnnnnnnnnnnnnnnnnnnnnnnnnnnnnnnnnnnnnnnnnnnnnnnnnnnnnnnnnnnnnnnnnnnnnnnnnnnnnnnnnnnnnnnnnnnnnnnnnnnnnnnnnnnnnnnnnnnnnnnnnnnnnnnnnnnnnnnnnnnnnnnnnnnnnnnnnnnnnnnnnnnnnnnnnnnnnnnnnnnnnnnnnnnnnnnnnnnnnnnnnnnnnnnnnnnnnnnnnnnnnnnnnnnnnnnnnnnnnnnnnnnnnnnnnnnnnnnnnnnnnnnnnnnnnnnnnnnnnnnnnnnnnnnnnnnnnnnnnnnnnnnnnnnnnnnnnnnnnnnnnnnnnnnnnnnnnnnnnnnnnnnnnnnnnnnnnnnnnnnnnnnnnnnnnnnnnnnnnnnnnnnnnnnnnnnnnnnnnnnnnnnnnnnnnnnnnnnnnnnnnnnnnnnnnnnnnnnnnnnnnnnnnnnnnnnnnnnnnnnnnnnnnnnnnnnnnnnnnnnnnnnnnnnnnnnnnnnnnnnnnnnnnnnnnnnnnnnnnnnnnnnnnnnnnnnnnnnnnnnnnnnnnnnnnnnnnnnnnnnnnnnnnnnnnnnnnnnnnnnnnnnnnnnnnnnnnnnnnnnnnnnnnnnnnnnnnnnnnnnnnnnnnnnnnnnnnnnnnnnnnnnnnnnnnnnnnnnnnnnnnnnnnnnnnnnnnnnnnnnnnnnnnnnnnnnnnnnnnnnnnnnnnnnnnnnnnnnnnnnnnnnnnnnnnnnnnnnnnnnnnnnnnnnnnnnnnnnnnnnnnnnnnnnnnnnnnnnnnnnnnnnnnnnnnnnnnnnnnnnnnnnnnnnnnnnnnnnnnnnnnnnnnnnnnnnnnnnnnnnnnnnnnnnnnnnnnnnnnnnnnnnnnnnnnnnnnnnnnnnnnnnnnnnnnnnnnnnnnnnnnnnnnnnnnnnnnnnnnnnnnnnnnnnnnnnnnnnnnnnnnnnnnnnnnnnnnnnnnnnnnnnnnnnnnnnnnnnnnnnnnnnnnnnnnnnnnnnnnnnnnnnnnnnnnnnnnnnnnnnnnnnnnnnnnnnnnnnnnnnnnnnnnnnnnnnnnnnnnnnnnnnnnnnnnnnnnnnnnnnnnnnnnnnnnnnnnnnnnnnnnnnnnnnnnnnnnnnnnnnnnnnnnnnnnnnnnnnnnnnnnnnnnnnnnnnnnnnnnnnnnnnnnnnnnnnnnnnnnnnnnnnnnnnnnnnnnnnnnnnnnnnnnnnnnnnnnnnnnnnnnnnnnnnnnnnnnnnnnnnnnnnnnnnnnnnnnnnnnnnnnnnnnnnnnnnnnnnnnnnnnnnnnnnnnnnnnnnnnnnnnnnnnnnnnnnnnnnnnnnnnnnnnnnnnnnnnnnnnnnnnnnnnnnnnnnnnnnnnnnnnnnnnnnnnnnnnnnnnnnnnnnnnnnnnnnnnnnnnnnnnnnnnnnnnnnnnnnnnnnnnnnnnnnnnnnnnnnnnnnnnnnnnnnnnnnnnnnnnnnnnnnnnnnnnnnnnnnnnnnnnnnnnnnnnnnnnnnnnnnnnnnnnnnnnnnnnnnnnnnnnnnnnnnnnnnnnnnnnnnnnnnnnnnnnnnnnnnnnnnnnnnnnnnnnnnnnnnnnnnnnnnnnnnnnnnnnnnnnnnnnnnnnnnnnnnnnnnnnnnnnnnnnnnnnnnnnnnnnnnnnnnnnnnnnnnnnnnnnnnnnnnnnnnnnnnnnnnnnnnnnnnnnnnnnnnnnnnnnnnnnnnnnnnnnnnnnnnnnnnnnnnnnnnnnnnnnnnnnnnnnnnnnnnnnnnnnnnnnnnnnnnnnnnnnnnnnnnnnnnnnnnnnnnnnnnnnnnnnnnnnnnnnnnnnnnnnnnnnnnnnnnnnnnnnnnnnnnnnnnnnnnnnnnnnnnnnnnnnnnnnnnnnnnnnnnnnnnnnnnnnnnnnnnnnnnnnnnnnnnnnnnnnnnnnnnnnnnnnnnnnnnnnnnnnnnnnnnnnnnnnnnnnnnnnnnnnnnnnnnnnnnnnnnnnnnnnnnnnnnnnnnnnnnnnnnnnnnnnnnnnnnnnnnnnnnnnnnnnnnnnnnnnnnnnnnnnnnnnnnnnnnnnnnnnnnnnnnnnnnnnnnnnnnnnnnnnnnnnnnnnnnnnnnnnnnnnnnnnnnnnnnnnnnnnnnnnnnnnnnnnnnnnnnnnnnnnnnnnnnnnnnnnnnnnnnnnnnnnnnnnnnnnnnnnnnnnnnnnnnnnnnnnnnnnnnnnnnnnnnnnnnnnnnnnnnnnnnnnnnnnnnnnnnnnnnnnnnnnnnnnnnnnnnnnnnnnnnnnnnnnnnnnnnnnnnnnnnnnnnnnnnnnnnnnnnnnnnnnnnnnnnnnnnnnnnnnnnnnnnnnnnnnnnnnnnnnnnnnnnnnnnnnnnnnnnnnnnnnnnnnnnnnnnnnnnnnnnnnnnnnnnnnnnnnnnnnnnnnnnnnnnnnnnnnnnnnnnnnnnnnnnnnnnnnnnnnnnnnnnnnnnnnnnnnnnnnnnnnnnnnnnnnnnnnnnnnnnnnnnnnnnnnnnnnnnnnnnnnnnnnnnnnnnnnnnnnnnnnnnnnnnnnnnnnnnnnnnnnnnnnnnnnnnnnnnnnnnnnnnnnnnnnnnnnnnnnnnnnnnnnnnnnnnnnnnnnnnnnnnnnnnnnnnnnnnnnnnnnnnnnnnnnnnnnnnnnnnnnnnnnnnnnnnnnnnnnnnnnnnnnnnnnnnnnnnnnnnnnnnnnnnnnnnnnnnnnnnnnnnnnnnnnnnnnnnnnnnnnnnnnnnnnnnnnnnnnnnnnnnnnnnnnnnnnnnnnnnnnnnnnnnnnnnnnnnnnnnnnnnnnnnnnnnnnnnnnnnnnnnnnnnnnnnnnnnnnnnnnnnnnnnnnnnnnnnnnnnnnnnnnnnnnnnnnnnnnnnnnnnnnnnnnnnnnnnnnnnnnnnnnnnnnnnnnnnnnnnnnnnnnnnnnnnnnnnnnnnnnnnnnnnnnnnnnnnnnnnnnnnnnnnnnnnnnnnnnnnnnnnnnnnnnnnnnnnnnnnnnnnnnnnnnnnnnnnnnnnnnnnnnnnnnnnnnnnnnnnnnnnnnnnnnnnnnnnnnnnnnnnnnnnnnnnnnnnnnnnnnnnnnnnnnnnnnnnnnnnnnnnnnnnnnnnnnnnnnnnnnnnnnnnnnnnnnnnnnnnnnnnnnnnnnnnnnnnnnnnnnnnnnnnnnnnnnnnnnnnnnnnnnnnnnnnnnnnnnnnnnnnnnnnnnnnnnnnnnnnnnnnnnnnnnnnnnnnnnnnnnnnnnnnnnnnnnnnnnnnnnnnnnnnnnnnnnnnnnnnnnnnnnnnnnnnnnnnnnnnnnnnnnnnnnnnnnnnnnnnnnnnnnnnnnnnnnnnnnnnnnnnnnnnnnnnnnnnnnnnnnnnnnnnnnnnnnnnnnnnnnnnnnnnnnnnnnnnnnnnnnnnnnnnnnnnnnnnnnnnnnnnnnnnnnnnnnnnnnnnnnnnnnnnnnnnnnnnnnnnnnnnnnnnnnnnnnnnnnnnnnnnnnnnnnnnnnnnnnnnnnnnnnnnnnnnnnnnnnnnnnnnnnnnnnnnnnnnnnnnnnnnnnnnnnnnnnnnnnnnnnnnnnnnnnnnnnnnnnnnnnnnnnnnnnnnnnnnnnnnnnnnnnnnnnnnnnnnnnnnnnnnnnnnnnnnnnnnnnnnnnnnnnnnnnnnnnnnnnnnnnnnnnnnnnnnnnnnnnnnnnnnnnnnnnnnnnnnnnnnnnnnnnnnnnnnnnnnnnnnnnnnnnnnnnnnnnnnnnnnnnnnnnnnnnnnnnnnnnnnnnnnnnnnnnnnnnnnnnnnnnnnnnnnnnnnnnnnnnnnnnnnnnnnnnnnnnnnnnnnnnnnnnnnnnnnnnnnnnnnnnnnnnnnnnnnnnnnnnnnnnnnnnnnnnnnnnnnnnnnnnnnnnnnnnnnnnnnnnnnnnnnnnnnnnnnnnnnnnnnnnnnnnnnnnnnnnnnnnnnnnnnnnnnnnnnnnnnnnnnnnnnnnnnnnnnnnnnnnnnnnnnnnnnnnnnnnnnnnnnnnnnnnnnnnnnnnnnnnnnnnnnnnnnnnnnnnnnnnnnnnnnnnnnnnnnnnnnnnnnnnnnnnnnnnnnnnnnnnnnnnnnnnnnnnnnnnnnnnnnnnnnnnnnnnnnnnnnnnnnnnnnnnnnnnnnnnnnnnnnnnnnnnnnnnnnnnnnnnnnnnnnnnnnnnnnnnnnnnnnnnnnnnnnnnnnnnnnnnnnnnnnnnnnnnnnnnnnnnnnnnnnnnnnnnnnnnnnnnnnnnnnnnnnnnnnnnnnnnnnnnnnnnnnnnnnnnnnnnnnnnnnnnnnnnnnnnnnnnnnnnnnnnnnnnnnnnnnnnnnnnnnnnnnnnnnnnnnnnnnnnnnnnnnnnnnnnnnnnnnnnnnnnnnnnnnnnnnnnnnnnnnnnnnnnnnnnnnnnnnnnnnnnnnnnnnnnnnnnnnnnnnnnnnnnnnnnnnnnnnnnnnnnnnnnnnnnnnnnnnnnnnnnnnnnnnnnnnnnnnnnnnnnnnnnnnnnnnnnnnnnnnnnnnnnnnnnnnnnnnnnnnnnnnnnnnnnnnnnnnnnnnnnnnnnnnnnnnnnnnnnnnnnnnnnnnnnnnnnnnnnnnnnnnnnnnnnnnnnnnnnnnnnnnnnnnnnnnnnnnnnnnnnnnnnnnnnnnnnnnnnnnnnnnnnnnnnnnnnnnnnnnnnnnnnnnnnnnnnnnnnnnnnnnnnnnnnnnnnnnnnnnnnnnnnnnnnnnnnnnnnnnnnnnnnnnnnnnnnnnnnnnnnnnnnnnnnnnnnnnnnnnnnnnnnnnnnnnnnnnnnnnnnnnnnnnnnnnnnnnnnnnnnnnnnnnnnnnnnnnnnnnnnnnnnnnnnnnnnnnnnnnnnnnnnnnnnnnnnnnnnnnnnnnnnnnnnnnnnnnnnnnnnnnnnnnnnnnnnnnnnnnnnnnnnnnnnnnnnnnnnnnnnnnnnnnnnnnnnnnnnnnnnnnnnnnnnnnnnnnnnnnnnnnnnnnnnnnnnnnnnnnnnnnnnnnnnnnnnnnnnnnnnnnnnnnnnnnnnnnnnnnnnnnnnnnnnnnnnnnnnnnnnnnnnnnnnnnnnnnnnnnnnnnnnnnnnnnnnnnnnnnnnnnnnnnnnnnnnnnnnnnnnnnnnnnnnnnnnnnnnnnnnnnnnnnnnnnnnnnnnnnnnnnnnnnnnnnnnnnnnnnnnnnnnnnnnnnnnnnnnnnnnnnnnnnnnnnnnnnnnnnnnnnnnnnnnnnnnnnnnnnnnnnnnnnnnnnnnnnnnnnnnnnnnnnnnnnnnnnnnnnnnnnnnnnnnnnnnnnnnnnnnnnnnnnnnnnnnnnnnnnnnnnnnnnnnnnnnnnnnnnnnnnnnnnnnnnnnnnnnnnnnnnnnnnnnnnnnnnnnnnnnnnnnnnnnnnnnnnnnnnnnnnnnnnnnnnnnnnnnnnnnnnnnnnnnnnnnnnnnnnnnnnnnnnnnnnnnnnnnnnnnnnnnnnnnnnnnnnnnnnnnnnnnnnnnnnnnnnnnnnnnnnnnnnnnnnnnnnnnnnnnnnnnnnnnnnnnnnnnnnnnnnnnnnnnnnnnnnnnnnnnnnnnnnnnnnnnnnnnnnnnnnnnnnnnnnnnnnnnnnnnnnnnnnnnnnnnnnnnnnnnnnnnnnnnnnnnnnnnnnnnnnnnnnnnnnnnnnnnnnnnnnnnnnnnnnnnnnnnnnnnnnnnnnnnnnnnnnnnnnnnnnnnnnnnnnnnnnnnnnnnnnnnnnnnnnnnnnnnnnnnnnnnnnnnnnnnnnnnnnnnnnnnnnnnnnnnnnnnnnnnnnnnnnnnnnnnnnnnnnnnnnnnnnnnnnnnnnnnnnnnnnnnnnnnnnnnnnnnnnnnnnnnnnnnnnnnnnnnnnnnnnnnnnnnnnnnnnnnnnnnnnnnnnnnnnnnnnnnnnnnnnnnnnnnnnnnnnnnnnnnnnnnnnnnnnnnnnnnnnnnnnnnnnnnnnnnnnnnnnnnnnnnnnnnnnnnnnnnnnnnnnnnnnnnnnnnnnnnnnnnnnnnnnnnnnnnnnnnnnnnnnnnnnnnnnnnnnnnnnnnnnnnnnnnnnnnnnnnnnnnnnnnnnnnnnnnnnnnnnnnnnnnnnnnnnnnnnnnnnnnnnnnnnnnnnnnnnnnnnnnnnnnnnnnnnnnnnnnnnnnnnnnnnnnnnnnnnnnnnnnnnnnnnnnnnnnnnnnnnnnnnnnnnnnnnnnnnnnnnnnnnnnnnnnnnnnnnnnnnnnnnnnnnnnnnnnnnnnnnnnnnnnnnnnnnnnnnnnnnnnnnnnnnnnnnnnnnnnnnnnnnnnnnnnnnnnnnnnnnnnnnnnnnnnnnnnnnnnnnnnnnnnnnnnnnnnnnnnnnnnnnnnnnnnnnnnnnnnnnnnnnnnnnnnnnnnnnnnnnnnnnnnnnnnnnnnnnnnnnnnnnnnnnnnnnnnnnnnnnnnnnnnnnnnnnnnnnnnnnnnnnnnnnnnnnnnnnnnnnnnnnnnnnnnnnnnnnnnnnnnnnnnnnnnnnnnnnnnnnnnnnnnnnnnnnnnnnnnnnnnnnnnnnnnnnnnnnnnnnnnnnnnnnnnnnnnnnnnnnnnnnnnnnnnnnnnnnnnnnnnnnnnnnnnnnnnnnnnnnnnnnnnnnnnnnnnnnnnnnnnnnnnnnnnnnnnnnnnnnnnnnnnnnnnnnnnnnnnnnnnnnnnnnnnnnnnnnnnnnnnnnnnnnnnnnnnnnnnnnnnnnnnnnnnnnnnnnnnnnnnnnnnnnnnnnnnnnnnnnnnnnnnnnnnnnnnnnnnnnnnnnnnnnnnnnnnnnnnnnnnnnnnnnnnnnnnnnnnnnnnnnnnnnnnnnnnnnnnnnnnnnnnnnnnnnnnnnnnnnnnnnnnnnnnnnnnnnnnnnnnnnnnnnnnnnnnnnnnnnnnnnnnnnnnnnnnnnnnnnnnnnnnnnnnnnnnnnnnnnnnnnnnnnnnnnnnnnnnnnnnnnnnnnnnnnnnnnnnnnnnnnnnnnnnnnnnnnnnnnnnnnnnnnnnnnnnnnnnnnnnnnnnnnnnnnnnnnnnnnnnnnnnnnnnnnnnnnnnnnnnnnnnnnnnnnnnnnnnnnnnnnnnnnnnnnnnnnnnnnnnnnnnnnnnnnnnnnnnnnnnnnnnnnnnnnnnnnnnnnnnnnnnnnnnnnnnnnnnnnnnnnnnnnnnnnnnnnnnnnnnnnnnnnnnnnnnnnnnnnnnnnnnnnnnnnnnnnnnnnnnnnnnnnnnnnnnnnnnnnnnnnnnnnnnnnnnnnnnnnnnnnnnnnnnnnnnnnnnnnnnnnnnnnnnnnnnnnnnnnnnnnnnnnnnnnnnnnnnnnnnnnnnnnnnnnnnnnnnnnnnnnnnnnnnnnnnnnnnnnnnnnnnnnnnnnnnnnnnnnnnnnnnnnnnnnnnnnnnnnnnnnnnnnnnnnnnnnnnnnnnnnnnnnnnnnnnnnnnnnnnnnnnnnnnnnnnnnnnnnnnnnnnnnnnnnnnnnnnnnnnnnnnnnnnnnnnnnnnnnnnnnnnnnnnnnnnnnnnnnnnnnnnnnnnnnnnnnnnnnnnnnnnnnnnnnnnnnnnnnnnnnnnnnnnnnnnnnnnnnnnnnnnnnnnnnnnnnnnnnnnnnnnnnnnnnnnnnnnnnnnnnnnnnnnnnnnnnnnnnnnnnnnnnnnnnnnnnnnnnnnnnnnnnnnnnnnnnnnnnnnnnnnnnnnnnnnnnnnnnnnnnnnnnnnnnnnnnnnnnnnnnnnnnnnnnnnnnnnnnnnnnnnnnnnnnnnnnnnnnnnnnnnnnnnnnnnnnnnnnnnnnnnnnnnnnnnnnnnnnnnnnnnnnnnnnnnnnnnnnnnnnnnnnnnnnnnnnnnnnnnnnnnnnnnnnnnnnnnnnnnnnnnnnnnnnnnnnnnnnnnnnnnnnnnnnnnnnnnnnnnnnnnnnnnnnnnnnnnnnnnnnnnnnnnnnnnnnnnnnnnnnnnnnnnnnnnnnnnnnnnnnnnnnnnnnnnnnnnnnnnnnnnnnnnnnnnnnnnnnnnnnnnnnnnnnnnnnnnnnnnnnnnnnnnnnnnnnnnnnnnnnnnnnnnnnnnnnnnnnnnnnnnnnnnnnnnnnnnnnnnnnnnnnnnnnnnnnnnnnnnnnnnnnnnnnnnnnnnnnnnnnnnnnnnnnnnnnnnnnnnnnnnnnnnnnnnnnnnnnnnnnnnnnnnnnnnnnnnnnnnnnnnnnnnnnnnnnnnnnnnnnnnnnnnnnnnnnnnnnnnnnnnnnnnnnnnnnnnnnnnnnnnnnnnnnnnnnnnnnnnnnnnnnnnnnnnnnnnnnnnnnnnnnnnnnnnnnnnnnnnnnnnnnnnnnnnnnnnnnnnnnnnnnnnnnnnnnnnnnnnnnnnnnnnnnnnnnnnnnnnnnnnnnnnnnnnnnnnnnnnnnnnnnnnnnnnnnnnnnnnnnnnnnnnnnnnnnnnnnnnnnnnnnnnnnnnnnnnnnnnnnnnnnnnnnnnnnnnnnnnnnnnnnnnnnnnnnnnnnnnnnnnnnnnnnnnnnnnnnnnnnnnnnnnnnnnnnnnnnnnnnnnnnnnnnnnnnnnnnnnnnnnnnnnnnnnnnnnnnnnnnnnnnnnnnnnnnnnnnnnnnnnnnnnnnnnnnnnnnnnnnnnnnnnnnnnnnnnnnnnnnnnnnnnnnnnnnnnnnnnnnnnnnnnnnnnnnnnnnnnnnnnnnnnnnnnnnnnnnnnnnnnnnnnnnnnnnnnnnnnnnnnnnnnnnnnnnnnnnnnnnnnnnnnnnnnnnnnnnnnnnnnnnnnnnnnnnnnnnnnnnnnnnnnnnnnnnnnnnnnnnnnnnnnnnnnnnnnnnnnnnnnnnnnnnnnnnnnnnnnnnnnnnnnnnnnnnnnnnnnnnnnnnnnnnnnnnnnnnnnnnnnnnnnnnnnnnnnnnnnnnnnnnnnnnnnnnnnnnnnnnnnnnnnnnnnnnnnnnnnnnnnnnnnnnnnnnnnnnnnnnnnnnnnnnnnnnnnnnnnnnnnnnnnnnnnnnnnnnnnnnnnnnnnnnnnnnnnnnnnnnnnnnnnnnnnnnnnnnnnnnnnnnnnnnnnnnnnnnnnnnnnnnnnnnnnnnnnnnnnnnnnnnnnnnnnnnnnnnnnnnnnnnnnnnnnnnnnnnnnnnnnnnnnnnnnnnnnnnnnnnnnnnnnnnnnnnnnnnnnnnnnnnnnnnnnnnnnnnnnnnnnnnnnnnnnnnnnnnnnnnnnnnnnnnnnnnnnnnnnnnnnnnnnnnnnnnnnnnnnnnnnnnnnnnnnnnnnnnnnnnnnnnnnnnnnnnnnnnnnnnnnnnnnnnnnnnnnnnnnnnnnnnnnnnnnnnnnnnnnnnnnnnnnnnnnnnnnnnnnnnnnnnnnnnnnnnnnnnnnnnnnnnnnnnnnnnnnnnnnnnnnnnnnnnnnnnnnnnnnnnnnnnnnnnnnnnnnnnnnnnnnnnnnnnnnnnnnnnnnnnnnnnnnnnnnnnnnnnnnnnnnnnnnnnnnnnnnnnnnnnnnnnnnnnnnnnnnnnnnnnnnnnnnnnnnnnnnnnnnnnnnnnnnnnnnnnnnnnnnnnnnnnnnnnnnnnnnnnnnnnnnnnnnnnnnnnnnnnnnnnnnnnnnnnnnnnnnnnnnnnnnnnnnnnnnnnnnnnnnnnnnnnnnnnnnnnnnnnnnnnnnnnnnnnnnnnnnnnnnnnnnnnnnnnnnnnnnnnnnnnnnnnnnnnnnnnnnnnnnnnnnnnnnnnnnnnnnnnnnnnnnnnnnnnnnnnnnnnnnnnnnnnnnnnnnnnnnnnnnnnnnnnnnnnnnnnnnnnnnnnnnnnnnnnnnnnnnnnnnnnnnnnnnnnnnnnnnnnnnnnnnnnnnnnnnnnnnnnnnnnnnnnnnnnnnnnnnnnnnnnnnnnnnnnnnnnnnnnnnnnnnnnnnnnnnnnnnnnnnnnnnnnnnnnnnnnnnnnnnnnnnnnnnnnnnnnnnnnnnnnnnnnnnnnnnnnnnnnnnnnnnnnnnnnnnnnnnnnnnnnnnnnnnnnnnnnnnnnnnnnnnnnnnnnnnnnnnnnnnnnnnnnnnnnnnnnnnnnnnnnnnnnnnnnnnnnnnnnnnnnnnnnnnnnnnnnnnnnnnnnnnnnnnnnnnnnnnnnnnnnnnnnnnnnnnnnnnnnnnnnnnnnnnnnnnnnnnnnnnnnnnnnnnnnnnnnnnnnnnnnnnnnnnnnnnnnnnnnnnnnnnnnnnnnnnnnnnnnnnnnnnnnnnnnnnnnnnnnnnnnnnnnnnnnnnnnnnnnnnnnnnnnnnnnnnnnnnnnnnnnnnnnnnnnnnnnnnnnnnnnnnnnnnnnnnnnnnnnnnnnnnnnnnnnnnnnnnnnnnnnnnnnnnnnnnnnnnnnnnnnnnnnnnnnnnnnnnnnnnnnnnnnnnnnnnnnnnnnnnnnnnnnnnnnnnnnnnnnnnnnnnnnnnnnnnnnnnnnnnnnnnnnnnnnnnnnnnnnnnnnnnnnnnnnnnnnnnnnnnnnnnnnnnnnnnnnnnnnnnnnnnnnnnnnnnnnnnnnnnnnnnnnnnnnnnnnnnnnnnnnnnnnnnnnnnnnnnnnnnnnnnnnnnnnnnnnnnnnnnnnnnnnnnnnnnnnnnnnnnnnnnnnnnnnnnnnnnnnnnnnnnnnnnnnnnnnnnnnnnnnnnnnnnnnnnnnnnnnnnnnnnnnnnnnnnnnnnnnnnnnnnnnnnnnnnnnnnnnnnnnnnnnnnnnnnnnnnnnnnnnnnnnnnnnnnnnnnnnnnnnnnnnnnnnnnnnnnnnnnnnnnnnnnnnnnnnnnnnnnnnnnnnnnnnnnnnnnnnnnnnnnnnnnnnnnnnnnnnnnnnnnnnnnnnnnnnnnnnnnnnnnnnnnnnnnnnnnnnnnnnnnnnnnnnnnnnnnnnnnnnnnnnnnnnnnnnnnnnnnnnnnnnnnnnnnnnnnnnnnnnnnnnnnnnnnnnnnnnnnnnnnnnnnnnnnnnnnnnnnnnnnnnnnnnnnnnnnnnnnnnnnnnnnnnnnnnnnnnnnnnnnnnnnnnnnnnnnnnnnnnnnnnnnnnnnnnnnnnnnnnnnnnnnnnnnnnnnnnnnnnnnnnnnnnnnnnnnnnnnnnnnnnnnnnnnnnnnnnnnnnnnnnnnnnnnnnnnnnnnnnnnnnnnnnnnnnnnnnnnnnnnnnnnnnnnnnnnnnnnnnnnnnnnnnnnnnnnnnnnnnnnnnnnnnnnnnnnnnnnnnnnnnnnnnnnnnnnnnnnnnnnnnnnnnnnnnnaataaagtatccaaacatacgtccttgcgtggcatccgagggcctcctgccttttctaaacctttagaaacaaccatagaaaagcgtaggcaggccctccatccaagacaaggccccaaaaaagtggggatgagtcagtatcatttctgcttgacgtccaatgagattagtgatatagtgttaaaccaagtacgggtggaaccgagctccgaccggtcggcgaccggccatctccctccgaagcccaattggatcgtggtgcgttttgaagaggcgtcatcatgaggatgcaaagcgatgggaaacgcaattcctgaagctggacaatattcaaatcctgaagcggctggcaaaagttttttcaaccggtatgaccatacctgtcatacccctgtgcgatactgaaaatagattgatggaggacggctatgaactataatctctgcgatgagaattggattccagtactctaccgaaacggccaattcaaggaagtcgggattttgcaggcattgcaggaggcggggcagatttcgcagattgccgcgtccaatccgatggatcgggttgccttgctccgtttcctgctggcgattgtctactggtgtcaaggcaatccaccggcagaagatgagaaggagcggattctggccgacggccaattcccgaaaaactggtttgggaagctggaacaaaagaaggagttgtttaacctgttaggagacgggcagagattccttcaagatatttccgcccaaagaaaacgtcccattaccgatctcatccacgaggttcctgctggaaataacttctggcacttcaatcacgccattgattaccaccacggactttgcccggcatgttgtgcacgaggattgcttcgcctacccttgttccacgtcagtgggttgccggatttgaagtcgggaatcaacggcgtaccgcccatctacgttatgccgcttgggaagactctcttggagaccctgcgtctcaactggcgacagcacggcggcgacttaggcgtccccgcatgggaggattgccgcatgacgccgccgacggatgctcccgttccattgttgacgggactgacggttctctcccgacgagtgtacctccatgatccctcggagtcggacgagtgttgcatcggttgtggaaagcgggttggagagttgattctatcctgcgaatttcaatcggcgggttcgctggagaaccggcattggaaagatcctcacgtcgtttattcctcttcggacaaggcggtgaaggctcctaacttggaggacgagcttatagccgatagaccgtggtgccagttgttctccgaagtgtcgttccccgacgagagccgaggcctgacgctgtttattacggggttttccacgagcaaagccaagtacgtggacgtctgggagcgaacatgtaagattggggcaaccaaccccgattccgtgcgacagtggaaggaaaccgtcgacaatctccggcggcttaagccgaaagactgggatgcaatggagccgaagggccgcaagtacaccgggattcgggccggtgtcaccgcaatgaccccgcatgtcgagactcaggtctcccgccgaattcccgaactgacggcgaatgatggcgagacagactttcaagaggggctgcaggagtaccgtaaggcgattggcattctggcctcctctctatatccgaacgccacttcggagcatctggatcggcaacgacaactccaggaggccgtaagattggctaggccgcgaaagtcgcttgccaagaaagaaaggaaggaacgatgaccgcgacgcatgattttctggagaacatccgatcactgaagaccggggaccgaggaagattaagggcactggctaacaagccgctggatcgctcgctgaacggctttgatctcttcgccggactgtggtggcccctgcgtcagaaaagccaatttgccccacgacgggaagtcgcatggctggtggccaagcttttcagcttttgtccactggatcaggagaatggcgcaaccgtggcgcgtcaactcggtcgactatcggataacgcccggcttcgacagcaatttgacgatctgctcgggctgcccctgtcgcagctcgaagttcctttgcaacagtttctccgcatgctggcccgccggtcactgtcggtggattggatccgcctcaccgatgacctttcacaatgggaaaaccgggagacccgcctccagtgggcgaaggagtttctcgaacggaattcacagtgttaactttttgtaggagacatcgtatgttgatcgacattcacatcatccagaaccacagcccgtcaaatctcaaccgggacgacctgggcgcgcccaagacatgctatttcggcggcgtcctgcggaaccgcatttccagccagtgcctcaagcgaagtatccgccagagcgagcagttcagccgattactcggcagcattcggacccgcaggctggcggagatcatcagtggaaaagtgaatgggaacaaggacgccaagaaacgcgcgtcagaggtcctcaagaagtgcggctttgacgccaaggacgacggcaccactgatatggccatctatgtttcgcagagcgccattgacaagatggcgaaccttctgaaaacgcacaacggtgacgcggacgctctcgcccaggaattcgccaaactgatcgcgacggaagtggctgttcccgatatggccttgacggggcgaatgctggagacgaaggaactggctaagtacgatacgaccgtggaagcggcgttgcaggccgcgcatgccatctccactcattcggcgactccagaagtcgattatttcgtcgctgccgatgatcttcccggagatgatgccggagccgcctacctcgatgaagcgatgtttgcatccgcctgcttctacaaatatttttccatcgactgggaccagcttgtcagcaatctcaagggcaacaaggagctggccgcccacaccgtcggagccttcctgcggggcgcggctctggcaaaccccaccggcaaacaaaatagctttgccgcccataatccgcccgatggaatcgtcgttgagatcaaggatacgcccatcagctatgccaacgccttcgccgcccccgttcccctcaccggtccgcgggatatggtcactcagagcattgcccaactcggacagtacatccacgacatggacaccgggtttggcggcccgaagaaacgattctggttctcgcccaatcttcgctacaagctccaactcgacggggcccagggggcgagcggcgaatctgtggaatcgctggacaagctagtcggaagactcctgcatgaaatgggctttgactggcagaaggttcagacggtcaccatcaactaagggagattgttccgatggataccacgacagacaactgccccaataccctattccttcgtctcgaaggtccgctccaagcctggggccaacatgaatcgaagttcgccatccgacggacggcggaggccccgaccaagtcggggatcatcggcctactgtgtgcggcgatgggaatttcgcgggatgccttcccggagcatcggaaaagattcgactccttgcgtctggccgtccgaatcgattccccaggcgttcgctggtgggattatcacactgtcggagccgggatgcagatgccgatctcggaaggacctggaaaagcaagggaagggccgctactcagtcggcgagagtacctgtgcgatgctcgcttcctggtcgccctgcaaggtccggtggacctgatcggcgaactggccgcagcggttcagaagccgaaatggtcgttgtacctgggccgtaagtgctgcccgccgtcactgcccgtgtgggtggccgatccgagccgtcaggaaagcgttctttccgccattgtatccgtgccttatcaaaagcgattccgggacgatgaggttccgcctgttgtggactgcctgatggattggcagtccgacgacaatcacacggaggctccgtcggacgccgaggtgtggtacgatgttccggtgggtttcagtccacccgcccaccagccgcggttcgtgatccggcggcaactgacagtcggaccagacggtgacgtgaaagtggctcaagagcccctcctgaatcgaacgccggggccgaaaagaattcgcgcggactacaccaatacggaataccgaagacgccgggaacagcgtctagatgcggaccatggtctttgcgtcttctgcaaggctccggcgaccacggttcagcatatcacctatcgtcgtgccggaggcaatgaggcgcaggaagacttgcgttccctctgccgtctttgtcacgacgcggtaaccatgatcgaatacggcttgggcatgggcctggaccgaatcaaccccgaagacccgcaatggcgggatcagatcattgccaaacgccgagagattgtcgaatttcggtccctggagactcgtcgaaggcgcttgcagcccgaggaggtggaatgatgtatctatcgacgctgctcatcaacgtgggcgacaatccggaccggccccgccccggtcggctctggctgcggaacctctaccgcgtccatcagcgattgtgcatggcgtttccttcgaaggcacgtctggagaaggataaattctttcttcgtccgtatgatcctcaggaatttgcccaagggcatgtccacgtcaaccggacgcaggaaaccgggtttcttttccgcgttgatcctcaaccgggcgggaatgtggtgattcttgtgctctcggctattgagccgaactgggcatacgctttccataatgcggagcatctcctggcccactccccgcaggtcaaggaattcaacccatccttcacggaagggcagcacttcaggttcctgctgtccgcaaaccccacaagaagatgttcgaagaactccaaggatatccggggcaatcctctagacggcaaatggataggcaagcgtattcccgttccgttcgagaaactcaaggactggctggtcacccgtggcaagaagggcggttttggtatcgacgacgtggcaatccaatccggctacgtctacgttgacaaacgcgatggcatcctcgaaagcaagcgactgctgtcggtccgattcgagggcatcctgaccgttaccgaccccgaagcattccgcaagactcttatctccggcatcggaccggccaaggcctttggctttgggctgctttcactggcgaagtttgatcggccttaggccgtaagattcgggggggactgtaaaatcgttctttgacaaaggaataacacgtgcgactcaaaaacctccaggagattccgaagttcgccgacaagctcagctacctctacgtggaacatgcggtggtggatcgccatgaaaaagccatcgccctgcatcaggcggatgggacgacgcccgttccatccgccgcgttgggtgtgctcgtcctgggaccgggcaccacgatcacccacgccgccgttcaaacgctggccgacaataattgcctggtcatctggtccggcgaacagggcgttcggttctacgcccagggactcggcggctcgcgtcacagccgtaatatgatccatcaggcccgactcgtcagcaacgacctcacgcggctgcaagtggtcgtgcgaatgtactgcctccggttccgtgaacccgtggatatgaatctgacgcttcagcagcttcgcggcatggaaggtatccgcgttcgccagtcctacgccgacgccgcccgcgaagcgggcgtcacgtggcaaggccgatcttataaccgcgaaaagtgggactacagcgacccggtcaatcgcgcactgtcggcggcaaactcctgcctgtacggactggttcacgccgcaatcctctccgccgggtattccccggccctggggttcattcataccggtaaacaactgtccttcgtctacgatatcgccgatctgtataaggccgatctgaccattcccatggcattcaaactcgccgccgcgaacccgccgaacctggaacgcgaggtccgaatcgcctgccgcgaccgcttcaaggaaagccgtctgatggaaaaaattattccggatattgccaaggtgctggacgtcgatatcaaggcgttggaggcccagcccgacgaattcgccgacgacgcggctctgcccgccgagtggtggacgccccagagcattcccgcttccgtgccgattggaaagatactcaaactctgccccaaccccgacccgatagcaaaggaggaaaaagaccatgaccatcctgattctggaacgagtccaggcgtcactgcggggtgaactcacccgctggctgattcagccaaagacgggcgtcttcgtcggccatgtctccgcccgcgttcgacaactgctgtggttcaaagtcattcgctcggtcaaggacggagccgccctcctgatccattccgataacagcgaacagggcttcgccatccagagctacggcgataccagcaaggtcattacagacttcgaaggcattttgcttccaaaaaccccgaaatcagcgtaatatccagtatattccccacgcacgtgggggtgaaccgaaagcccatgaaaatatccgcaattgggcataatattccccacgcacgtgggggtgaaccgtccgcccccggatccgaagacggcattgccgaatattccccacgcacgtgggggtgaaccgtacgctccaatctggcggcggcgatgatattgatattccccacgcacgtgggggtgaaccggccactccctatttcattccctcccccctagcatattccccacgcacgtgggggtgaaccggggaggccccggcggaaaccttgacgcttggcatattccccacgcacgtgggggtgaaccgatccttgaggttgcagggtcgggaaacgtaccatattccccacgcacgtgggggtgaaccggcc

SEQ ID NO: 1119 - DNA, 103423 bp, Artificial Sequence
  Synthetic Oligonucleotide
  misc_feature (1)..(96436): n is a, c, g, or t
  misc_feature (101575)..(101584): n is a, c, g, or t
nnnnnnnnnnnnnnnnnnnnnnnnnnnnnnnnnnnnnnnnnnnnnnnnnnnnnnnnnnnnnnnnnnnnnnnnnnnnnnnnnnnnnnnnnnnnnnnnnnnnnnnnnnnnnnnnnnnnnnnnnnnnnnnnnnnnnnnnnnnnnnnnnnnnnnnnnnnnnnnnnnnnnnnnnnnnnnnnnnnnnnnnnnnnnnnnnnnnnnnnnnnnnnnnnnnnnnnnnnnnnnnnnnnnnnnnnnnnnnnnnnnnnnnnnnnnnnnnnnnnnnnnnnnnnnnnnnnnnnnnnnnnnnnnnnnnnnnnnnnnnnnnnnnnnnnnnnnnnnnnnnnnnnnnnnnnnnnnnnnnnnnnnnnnnnnnnnnnnnnnnnnnnnnnnnnnnnnnnnnnnnnnnnnnnnnnnnnnnnnnnnnnnnnnnnnnnnnnnnnnnnnnnnnnnnnnnnnnnnnnnnnnnnnnnnnnnnnnnnnnnnnnnnnnnnnnnnnnnnnnnnnnnnnnnnnnnnnnnnnnnnnnnnnnnnnnnnnnnnnnnnnnnnnnnnnnnnnnnnnnnnnnnnnnnnnnnnnnnnnnnnnnnnnnnnnnnnnnnnnnnnnnnnnnnnnnnnnnnnnnnnnnnnnnnnnnnnnnnnnnnnnnnnnnnnnnnnnnnnnnnnnnnnnnnnnnnnnnnnnnnnnnnnnnnnnnnnnnnnnnnnnnnnnnnnnnnnnnnnnnnnnnnnnnnnnnnnnnnnnnnnnnnnnnnnnnnnnnnnnnnnnnnnnnnnnnnnnnnnnnnnnnnnnnnnnnnnnnnnnnnnnnnnnnnnnnnnnnnnnnnnnnnnnnnnnnnnnnnnnnnnnnnnnnnnnnnnnnnnnnnnnnnnnnnnnnnnnnnnnnnnnnnnnnnnnnnnnnnnnnnnnnnnnnnnnnnnnnnnnnnnnnnnnnnnnnnnnnnnnnnnnnnnnnnnnnnnnnnnnnnnnnnnnnnnnnnnnnnnnnnnnnnnnnnnnnnnnnnnnnnnnnnnnnnnnnnnnnnnnnnnnnnnnnnnnnnnnnnnnnnnnnnnnnnnnnnnnnnnnnnnnnnnnnnnnnnnnnnnnnnnnnnnnnnnnnnnnnnnnnnnnnnnnnnnnnnnnnnnnnnnnnnnnnnnnnnnnnnnnnnnnnnnnnnnnnnnnnnnnnnnnnnnnnnnnnnnnnnnnnnnnnnnnnnnnnnnnnnnnnnnnnnnnnnnnnnnnnnnnnnnnnnnnnnnnnnnnnnnnnnnnnnnnnnnnnnnnnnnnnnnnnnnnnnnnnnnnnnnnnnnnnnnnnnnnnnnnnnnnnnnnnnnnnnnnnnnnnnnnnnnnnnnnnnnnnnnnnnnnnnnnnnnnnnnnnnnnnnnnnnnnnnnnnnnnnnnnnnnnnnnnnnnnnnnnnnnnnnnnnnnnnnnnnnnnnnnnnnnnnnnnnnnnnnnnnnnnnnnnnnnnnnnnnnnnnnnnnnnnnnnnnnnnnnnnnnnnnnnnnnnnnnnnnnnnnnnnnnnnnnnnnnnnnnnnnnnnnnnnnnnnnnnnnnnnnnnnnnnnnnnnnnnnnnnnnnnnnnnnnnnnnnnnnnnnnnnnnnnnnnnnnnnnnnnnnnnnnnnnnnnnnnnnnnnnnnnnnnnnnnnnnnnnnnnnnnnnnnnnnnnnnnnnnnnnnnnnnnnnnnnnnnnnnnnnnnnnnnnnnnnnnnnnnnnnnnnnnnnnnnnnnnnnnnnnnnnnnnnnnnnnnnnnnnnnnnnnnnnnnnnnnnnnnnnnnnnnnnnnnnnnnnnnnnnnnnnnnnnnnnnnnnnnnnnnnnnnnnnnnnnnnnnnnnnnnnnnnnnnnnnnnnnnnnnnnnnnnnnnnnnnnnnnnnnnnnnnnnnnnnnnnnnnnnnnnnnnnnnnnnnnnnnnnnnnnnnnnnnnnnnnnnnnnnnnnnnnnnnnnnnnnnnnnnnnnnnnnnnnnnnnnnnnnnnnnnnnnnnnnnnnnnnnnnnnnnnnnnnnnnnnnnnnnnnnnnnnnnnnnnnnnnnnnnnnnnnnnnnnnnnnnnnnnnnnnnnnnnnnnnnnnnnnnnnnnnnnnnnnnnnnnnnnnnnnnnnnnnnnnnnnnnnnnnnnnnnnnnnnnnnnnnnnnnnnnnnnnnnnnnnnnnnnnnnnnnnnnnnnnnnnnnnnnnnnnnnnnnnnnnnnnnnnnnnnnnnnnnnnnnnnnnnnnnnnnnnnnnnnnnnnnnnnnnnnnnnnnnnnnnnnnnnnnnnnnnnnnnnnnnnnnnnnnnnnnnnnnnnnnnnnnnnnnnnnnnnnnnnnnnnnnnnnnnnnnnnnnnnnnnnnnnnnnnnnnnnnnnnnnnnnnnnnnnnnnnnnnnnnnnnnnnnnnnnnnnnnnnnnnnnnnnnnnnnnnnnnnnnnnnnnnnnnnnnnnnnnnnnnnnnnnnnnnnnnnnnnnnnnnnnnnnnnnnnnnnnnnnnnnnnnnnnnnnnnnnnnnnnnnnnnnnnnnnnnnnnnnnnnnnnnnnnnnnnnnnnnnnnnnnnnnnnnnnnnnnnnnnnnnnnnnnnnnnnnnnnnnnnnnnnnnnnnnnnnnnnnnnnnnnnnnnnnnnnnnnnnnnnnnnnnnnnnnnnnnnnnnnnnnnnnnnnnnnnnnnnnnnnnnnnnnnnnnnnnnnnnnnnnnnnnnnnnnnnnnnnnnnnnnnnnnnnnnnnnnnnnnnnnnnnnnnnnnnnnnnnnnnnnnnnnnnnnnnnnnnnnnnnnnnnnnnnnnnnnnnnnnnnnnnnnnnnnnnnnnnnnnnnnnnnnnnnnnnnnnnnnnnnnnnnnnnnnnnnnnnnnnnnnnnnnnnnnnnnnnnnnnnnnnnnnnnnnnnnnnnnnnnnnnnnnnnnnnnnnnnnnnnnnnnnnnnnnnnnnnnnnnnnnnnnnnnnnnnnnnnnnnnnnnnnnnnnnnnnnnnnnnnnnnnnnnnnnnnnnnnnnnnnnnnnnnnnnnnnnnnnnnnnnnnnnnnnnnnnnnnnnnnnnnnnnnnnnnnnnnnnnnnnnnnnnnnnnnnnnnnnnnnnnnnnnnnnnnnnnnnnnnnnnnnnnnnnnnnnnnnnnnnnnnnnnnnnnnnnnnnnnnnnnnnnnnnnnnnnnnnnnnnnnnnnnnnnnnnnnnnnnnnnnnnnnnnnnnnnnnnnnnnnnnnnnnnnnnnnnnnnnnnnnnnnnnnnnnnnnnnnnnnnnnnnnnnnnnnnnnnnnnnnnnnnnnnnnnnnnnnnnnnnnnnnnnnnnnnnnnnnnnnnnnnnnnnnnnnnnnnnnnnnnnnnnnnnnnnnnnnnnnnnnnnnnnnnnnnnnnnnnnnnnnnnnnnnnnnnnnnnnnnnnnnnnnnnnnnnnnnnnnnnnnnnnnnnnnnnnnnnnnnnnnnnnnnnnnnnnnnnnnnnnnnnnnnnnnnnnnnnnnnnnnnnnnnnnnnnnnnnnnnnnnnnnnnnnnnnnnnnnnnnnnnnnnnnnnnnnnnnnnnnnnnnnnnnnnnnnnnnnnnnnnnnnnnnnnnnnnnnnnnnnnnnnnnnnnnnnnnnnnnnnnnnnnnnnnnnnnnnnnnnnnnnnnnnnnnnnnnnnnnnnnnnnnnnnnnnnnnnnnnnnnnnnnnnnnnnnnnnnnnnnnnnnnnnnnnnnnnnnnnnnnnnnnnnnnnnnnnnnnnnnnnnnnnnnnnnnnnnnnnnnnnnnnnnnnnnnnnnnnnnnnnnnnnnnnnnnnnnnnnnnnnnnnnnnnnnnnnnnnnnnnnnnnnnnnnnnnnnnnnnnnnnnnnnnnnnnnnnnnnnnnnnnnnnnnnnnnnnnnnnnnnnnnnnnnnnnnnnnnnnnnnnnnnnnnnnnnnnnnnnnnnnnnnnnnnnnnnnnnnnnnnnnnnnnnnnnnnnnnnnnnnnnnnnnnnnnnnnnnnnnnnnnnnnnnnnnnnnnnnnnnnnnnnnnnnnnnnnnnnnnnnnnnnnnnnnnnnnnnnnnnnnnnnnnnnnnnnnnnnnnnnnnnnnnnnnnnnnnnnnnnnnnnnnnnnnnnnnnnnnnnnnnnnnnnnnnnnnnnnnnnnnnnnnnnnnnnnnnnnnnnnnnnnnnnnnnnnnnnnnnnnnnnnnnnnnnnnnnnnnnnnnnnnnnnnnnnnnnnnnnnnnnnnnnnnnnnnnnnnnnnnnnnnnnnnnnnnnnnnnnnnnnnnnnnnnnnnnnnnnnnnnnnnnnnnnnnnnnnnnnnnnnnnnnnnnnnnnnnnnnnnnnnnnnnnnnnnnnnnnnnnnnnnnnnnnnnnnnnnnnnnnnnnnnnnnnnnnnnnnnnnnnnnnnnnnnnnnnnnnnnnnnnnnnnnnnnnnnnnnnnnnnnnnnnnnnnnnnnnnnnnnnnnnnnnnnnnnnnnnnnnnnnnnnnnnnnnnnnnnnnnnnnnnnnnnnnnnnnnnnnnnnnnnnnnnnnnnnnnnnnnnnnnnnnnnnnnnnnnnnnnnnnnnnnnnnnnnnnnnnnnnnnnnnnnnnnnnnnnnnnnnnnnnnnnnnnnnnnnnnnnnnnnnnnnnnnnnnnnnnnnnnnnnnnnnnnnnnnnnnnnnnnnnnnnnnnnnnnnnnnnnnnnnnnnnnnnnnnnnnnnnnnnnnnnnnnnnnnnnnnnnnnnnnnnnnnnnnnnnnnnnnnnnnnnnnnnnnnnnnnnnnnnnnnnnnnnnnnnnnnnnnnnnnnnnnnnnnnnnnnnnnnnnnnnnnnnnnnnnnnnnnnnnnnnnnnnnnnnnnnnnnnnnnnnnnnnnnnnnnnnnnnnnnnnnnnnnnnnnnnnnnnnnnnnnnnnnnnnnnnnnnnnnnnnnnnnnnnnnnnnnnnnnnnnnnnnnnnnnnnnnnnnnnnnnnnnnnnnnnnnnnnnnnnnnnnnnnnnnnnnnnnnnnnnnnnnnnnnnnnnnnnnnnnnnnnnnnnnnnnnnnnnnnnnnnnnnnnnnnnnnnnnnnnnnnnnnnnnnnnnnnnnnnnnnnnnnnnnnnnnnnnnnnnnnnnnnnnnnnnnnnnnnnnnnnnnnnnnnnnnnnnnnnnnnnnnnnnnnnnnnnnnnnnnnnnnnnnnnnnnnnnnnnnnnnnnnnnnnnnnnnnnnnnnnnnnnnnnnnnnnnnnnnnnnnnnnnnnnnnnnnnnnnnnnnnnnnnnnnnnnnnnnnnnnnnnnnnnnnnnnnnnnnnnnnnnnnnnnnnnnnnnnnnnnnnnnnnnnnnnnnnnnnnnnnnnnnnnnnnnnnnnnnnnnnnnnnnnnnnnnnnnnnnnnnnnnnnnnnnnnnnnnnnnnnnnnnnnnnnnnnnnnnnnnnnnnnnnnnnnnnnnnnnnnnnnnnnnnnnnnnnnnnnnnnnnnnnnnnnnnnnnnnnnnnnnnnnnnnnnnnnnnnnnnnnnnnnnnnnnnnnnnnnnnnnnnnnnnnnnnnnnnnnnnnnnnnnnnnnnnnnnnnnnnnnnnnnnnnnnnnnnnnnnnnnnnnnnnnnnnnnnnnnnnnnnnnnnnnnnnnnnnnnnnnnnnnnnnnnnnnnnnnnnnnnnnnnnnnnnnnnnnnnnnnnnnnnnnnnnnnnnnnnnnnnnnnnnnnnnnnnnnnnnnnnnnnnnnnnnnnnnnnnnnnnnnnnnnnnnnnnnnnnnnnnnnnnnnnnnnnnnnnnnnnnnnnnnnnnnnnnnnnnnnnnnnnnnnnnnnnnnnnnnnnnnnnnnnnnnnnnnnnnnnnnnnnnnnnnnnnnnnnnnnnnnnnnnnnnnnnnnnnnnnnnnnnnnnnnnnnnnnnnnnnnnnnnnnnnnnnnnnnnnnnnnnnnnnnnnnnnnnnnnnnnnnnnnnnnnnnnnnnnnnnnnnnnnnnnnnnnnnnnnnnnnnnnnnnnnnnnnnnnnnnnnnnnnnnnnnnnnnnnnnnnnnnnnnnnnnnnnnnnnnnnnnnnnnnnnnnnnnnnnnnnnnnnnnnnnnnnnnnnnnnnnnnnnnnnnnnnnnnnnnnnnnnnnnnnnnnnnnnnnnnnnnnnnnnnnnnnnnnnnnnnnnnnnnnnnnnnnnnnnnnnnnnnnnnnnnnnnnnnnnnnnnnnnnnnnnnnnnnnnnnnnnnnnnnnnnnnnnnnnnnnnnnnnnnnnnnnnnnnnnnnnnnnnnnnnnnnnnnnnnnnnnnnnnnnnnnnnnnnnnnnnnnnnnnnnnnnnnnnnnnnnnnnnnnnnnnnnnnnnnnnnnnnnnnnnnnnnnnnnnnnnnnnnnnnnnnnnnnnnnnnnnnnnnnnnnnnnnnnnnnnnnnnnnnnnnnnnnnnnnnnnnnnnnnnnnnnnnnnnnnnnnnnnnnnnnnnnnnnnnnnnnnnnnnnnnnnnnnnnnnnnnnnnnnnnnnnnnnnnnnnnnnnnnnnnnnnnnnnnnnnnnnnnnnnnnnnnnnnnnnnnnnnnnnnnnnnnnnnnnnnnnnnnnnnnnnnnnnnnnnnnnnnnnnnnnnnnnnnnnnnnnnnnnnnnnnnnnnnnnnnnnnnnnnnnnnnnnnnnnnnnnnnnnnnnnnnnnnnnnnnnnnnnnnnnnnnnnnnnnnnnnnnnnnnnnnnnnnnnnnnnnnnnnnnnnnnnnnnnnnnnnnnnnnnnnnnnnnnnnnnnnnnnnnnnnnnnnnnnnnnnnnnnnnnnnnnnnnnnnnnnnnnnnnnnnnnnnnnnnnnnnnnnnnnnnnnnnnnnnnnnnnnnnnnnnnnnnnnnnnnnnnnnnnnnnnnnnnnnnnnnnnnnnnnnnnnnnnnnnnnnnnnnnnnnnnnnnnnnnnnnnnnnnnnnnnnnnnnnnnnnnnnnnnnnnnnnnnnnnnnnnnnnnnnnnnnnnnnnnnnnnnnnnnnnnnnnnnnnnnnnnnnnnnnnnnnnnnnnnnnnnnnnnnnnnnnnnnnnnnnnnnnnnnnnnnnnnnnnnnnnnnnnnnnnnnnnnnnnnnnnnnnnnnnnnnnnnnnnnnnnnnnnnnnnnnnnnnnnnnnnnnnnnnnnnnnnnnnnnnnnnnnnnnnnnnnnnnnnnnnnnnnnnnnnnnnnnnnnnnnnnnnnnnnnnnnnnnnnnnnnnnnnnnnnnnnnnnnnnnnnnnnnnnnnnnnnnnnnnnnnnnnnnnnnnnnnnnnnnnnnnnnnnnnnnnnnnnnnnnnnnnnnnnnnnnnnnnnnnnnnnnnnnnnnnnnnnnnnnnnnnnnnnnnnnnnnnnnnnnnnnnnnnnnnnnnnnnnnnnnnnnnnnnnnnnnnnnnnnnnnnnnnnnnnnnnnnnnnnnnnnnnnnnnnnnnnnnnnnnnnnnnnnnnnnnnnnnnnnnnnnnnnnnnnnnnnnnnnnnnnnnnnnnnnnnnnnnnnnnnnnnnnnnnnnnnnnnnnnnnnnnnnnnnnnnnnnnnnnnnnnnnnnnnnnnnnnnnnnnnnnnnnnnnnnnnnnnnnnnnnnnnnnnnnnnnnnnnnnnnnnnnnnnnnnnnnnnnnnnnnnnnnnnnnnnnnnnnnnnnnnnnnnnnnnnnnnnnnnnnnnnnnnnnnnnnnnnnnnnnnnnnnnnnnnnnnnnnnnnnnnnnnnnnnnnnnnnnnnnnnnnnnnnnnnnnnnnnnnnnnnnnnnnnnnnnnnnnnnnnnnnnnnnnnnnnnnnnnnnnnnnnnnnnnnnnnnnnnnnnnnnnnnnnnnnnnnnnnnnnnnnnnnnnnnnnnnnnnnnnnnnnnnnnnnnnnnnnnnnnnnnnnnnnnnnnnnnnnnnnnnnnnnnnnnnnnnnnnnnnnnnnnnnnnnnnnnnnnnnnnnnnnnnnnnnnnnnnnnnnnnnnnnnnnnnnnnnnnnnnnnnnnnnnnnnnnnnnnnnnnnnnnnnnnnnnnnnnnnnnnnnnnnnnnnnnnnnnnnnnnnnnnnnnnnnnnnnnnnnnnnnnnnnnnnnnnnnnnnnnnnnnnnnnnnnnnnnnnnnnnnnnnnnnnnnnnnnnnnnnnnnnnnnnnnnnnnnnnnnnnnnnnnnnnnnnnnnnnnnnnnnnnnnnnnnnnnnnnnnnnnnnnnnnnnnnnnnnnnnnnnnnnnnnnnnnnnnnnnnnnnnnnnnnnnnnnnnnnnnnnnnnnnnnnnnnnnnnnnnnnnnnnnnnnnnnnnnnnnnnnnnnnnnnnnnnnnnnnnnnnnnnnnnnnnnnnnnnnnnnnnnnnnnnnnnnnnnnnnnnnnnnnnnnnnnnnnnnnnnnnnnnnnnnnnnnnnnnnnnnnnnnnnnnnnnnnnnnnnnnnnnnnnnnnnnnnnnnnnnnnnnnnnnnnnnnnnnnnnnnnnnnnnnnnnnnnnnnnnnnnnnnnnnnnnnnnnnnnnnnnnnnnnnnnnnnnnnnnnnnnnnnnnnnnnnnnnnnnnnnnnnnnnnnnnnnnnnnnnnnnnnnnnnnnnnnnnnnnnnnnnnnnnnnnnnnnnnnnnnnnnnnnnnnnnnnnnnnnnnnnnnnnnnnnnnnnnnnnnnnnnnnnnnnnnnnnnnnnnnnnnnnnnnnnnnnnnnnnnnnnnnnnnnnnnnnnnnnnnnnnnnnnnnnnnnnnnnnnnnnnnnnnnnnnnnnnnnnnnnnnnnnnnnnnnnnnnnnnnnnnnnnnnnnnnnnnnnnnnnnnnnnnnnnnnnnnnnnnnnnnnnnnnnnnnnnnnnnnnnnnnnnnnnnnnnnnnnnnnnnnnnnnnnnnnnnnnnnnnnnnnnnnnnnnnnnnnnnnnnnnnnnnnnnnnnnnnnnnnnnnnnnnnnnnnnnnnnnnnnnnnnnnnnnnnnnnnnnnnnnnnnnnnnnnnnnnnnnnnnnnnnnnnnnnnnnnnnnnnnnnnnnnnnnnnnnnnnnnnnnnnnnnnnnnnnnnnnnnnnnnnnnnnnnnnnnnnnnnnnnnnnnnnnnnnnnnnnnnnnnnnnnnnnnnnnnnnnnnnnnnnnnnnnnnnnnnnnnnnnnnnnnnnnnnnnnnnnnnnnnnnnnnnnnnnnnnnnnnnnnnnnnnnnnnnnnnnnnnnnnnnnnnnnnnnnnnnnnnnnnnnnnnnnnnnnnnnnnnnnnnnnnnnnnnnnnnnnnnnnnnnnnnnnnnnnnnnnnnnnnnnnnnnnnnnnnnnnnnnnnnnnnnnnnnnnnnnnnnnnnnnnnnnnnnnnnnnnnnnnnnnnnnnnnnnnnnnnnnnnnnnnnnnnnnnnnnnnnnnnnnnnnnnnnnnnnnnnnnnnnnnnnnnnnnnnnnnnnnnnnnnnnnnnnnnnnnnnnnnnnnnnnnnnnnnnnnnnnnnnnnnnnnnnnnnnnnnnnnnnnnnnnnnnnnnnnnnnnnnnnnnnnnnnnnnnnnnnnnnnnnnnnnnnnnnnnnnnnnnnnnnnnnnnnnnnnnnnnnnnnnnnnnnnnnnnnnnnnnnnnnnnnnnnnnnnnnnnnnnnnnnnnnnnnnnnnnnnnnnnnnnnnnnnnnnnnnnnnnnnnnnnnnnnnnnnnnnnnnnnnnnnnnnnnnnnnnnnnnnnnnnnnnnnnnnnnnnnnnnnnnnnnnnnnnnnnnnnnnnnnnnnnnnnnnnnnnnnnnnnnnnnnnnnnnnnnnnnnnnnnnnnnnnnnnnnnnnnnnnnnnnnnnnnnnnnnnnnnnnnnnnnnnnnnnnnnnnnnnnnnnnnnnnnnnnnnnnnnnnnnnnnnnnnnnnnnnnnnnnnnnnnnnnnnnnnnnnnnnnnnnnnnnnnnnnnnnnnnnnnnnnnnnnnnnnnnnnnnnnnnnnnnnnnnnnnnnnnnnnnnnnnnnnnnnnnnnnnnnnnnnnnnnnnnnnnnnnnnnnnnnnnnnnnnnnnnnnnnnnnnnnnnnnnnnnnnnnnnnnnnnnnnnnnnnnnnnnnnnnnnnnnnnnnnnnnnnnnnnnnnnnnnnnnnnnnnnnnnnnnnnnnnnnnnnnnnnnnnnnnnnnnnnnnnnnnnnnnnnnnnnnnnnnnnnnnnnnnnnnnnnnnnnnnnnnnnnnnnnnnnnnnnnnnnnnnnnnnnnnnnnnnnnnnnnnnnnnnnnnnnnnnnnnnnnnnnnnnnnnnnnnnnnnnnnnnnnnnnnnnnnnnnnnnnnnnnnnnnnnnnnnnnnnnnnnnnnnnnnnnnnnnnnnnnnnnnnnnnnnnnnnnnnnnnnnnnnnnnnnnnnnnnnnnnnnnnnnnnnnnnnnnnnnnnnnnnnnnnnnnnnnnnnnnnnnnnnnnnnnnnnnnnnnnnnnnnnnnnnnnnnnnnnnnnnnnnnnnnnnnnnnnnnnnnnnnnnnnnnnnnnnnnnnnnnnnnnnnnnnnnnnnnnnnnnnnnnnnnnnnnnnnnnnnnnnnnnnnnnnnnnnnnnnnnnnnnnnnnnnnnnnnnnnnnnnnnnnnnnnnnnnnnnnnnnnnnnnnnnnnnnnnnnnnnnnnnnnnnnnnnnnnnnnnnnnnnnnnnnnnnnnnnnnnnnnnnnnnnnnnnnnnnnnnnnnnnnnnnnnnnnnnnnnnnnnnnnnnnnnnnnnnnnnnnnnnnnnnnnnnnnnnnnnnnnnnnnnnnnnnnnnnnnnnnnnnnnnnnnnnnnnnnnnnnnnnnnnnnnnnnnnnnnnnnnnnnnnnnnnnnnnnnnnnnnnnnnnnnnnnnnnnnnnnnnnnnnnnnnnnnnnnnnnnnnnnnnnnnnnnnnnnnnnnnnnnnnnnnnnnnnnnnnnnnnnnnnnnnnnnnnnnnnnnnnnnnnnnnnnnnnnnnnnnnnnnnnnnnnnnnnnnnnnnnnnnnnnnnnnnnnnnnnnnnnnnnnnnnnnnnnnnnnnnnnnnnnnnnnnnnnnnnnnnnnnnnnnnnnnnnnnnnnnnnnnnnnnnnnnnnnnnnnnnnnnnnnnnnnnnnnnnnnnnnnnnnnnnnnnnnnnnnnnnnnnnnnnnnnnnnnnnnnnnnnnnnnnnnnnnnnnnnnnnnnnnnnnnnnnnnnnnnnnnnnnnnnnnnnnnnnnnnnnnnnnnnnnnnnnnnnnnnnnnnnnnnnnnnnnnnnnnnnnnnnnnnnnnnnnnnnnnnnnnnnnnnnnnnnnnnnnnnnnnnnnnnnnnnnnnnnnnnnnnnnnnnnnnnnnnnnnnnnnnnnnnnnnnnnnnnnnnnnnnnnnnnnnnnnnnnnnnnnnnnnnnnnnnnnnnnnnnnnnnnnnnnnnnnnnnnnnnnnnnnnnnnnnnnnnnnnnnnnnnnnnnnnnnnnnnnnnnnnnnnnnnnnnnnnnnnnnnnnnnnnnnnnnnnnnnnnnnnnnnnnnnnnnnnnnnnnnnnnnnnnnnnnnnnnnnnnnnnnnnnnnnnnnnnnnnnnnnnnnnnnnnnnnnnnnnnnnnnnnnnnnnnnnnnnnnnnnnnnnnnnnnnnnnnnnnnnnnnnnnnnnnnnnnnnnnnnnnnnnnnnnnnnnnnnnnnnnnnnnnnnnnnnnnnnnnnnnnnnnnnnnnnnnnnnnnnnnnnnnnnnnnnnnnnnnnnnnnnnnnnnnnnnnnnnnnnnnnnnnnnnnnnnnnnnnnnnnnnnnnnnnnnnnnnnnnnnnnnnnnnnnnnnnnnnnnnnnnnnnnnnnnnnnnnnnnnnnnnnnnnnnnnnnnnnnnnnnnnnnnnnnnnnnnnnnnnnnnnnnnnnnnnnnnnnnnnnnnnnnnnnnnnnnnnnnnnnnnnnnnnnnnnnnnnnnnnnnnnnnnnnnnnnnnnnnnnnnnnnnnnnnnnnnnnnnnnnnnnnnnnnnnnnnnnnnnnnnnnnnnnnnnnnnnnnnnnnnnnnnnnnnnnnnnnnnnnnnnnnnnnnnnnnnnnnnnnnnnnnnnnnnnnnnnnnnnnnnnnnnnnnnnnnnnnnnnnnnnnnnnnnnnnnnnnnnnnnnnnnnnnnnnnnnnnnnnnnnnnnnnnnnnnnnnnnnnnnnnnnnnnnnnnnnnnnnnnnnnnnnnnnnnnnnnnnnnnnnnnnnnnnnnnnnnnnnnnnnnnnnnnnnnnnnnnnnnnnnnnnnnnnnnnnnnnnnnnnnnnnnnnnnnnnnnnnnnnnnnnnnnnnnnnnnnnnnnnnnnnnnnnnnnnnnnnnnnnnnnnnnnnnnnnnnnnnnnnnnnnnnnnnnnnnnnnnnnnnnnnnnnnnnnnnnnnnnnnnnnnnnnnnnnnnnnnnnnnnnnnnnnnnnnnnnnnnnnnnnnnnnnnnnnnnnnnnnnnnnnnnnnnnnnnnnnnnnnnnnnnnnnnnnnnnnnnnnnnnnnnnnnnnnnnnnnnnnnnnnnnnnnnnnnnnnnnnnnnnnnnnnnnnnnnnnnnnnnnnnnnnnnnnnnnnnnnnnnnnnnnnnnnnnnnnnnnnnnnnnnnnnnnnnnnnnnnnnnnnnnnnnnnnnnnnnnnnnnnnnnnnnnnnnnnnnnnnnnnnnnnnnnnnnnnnnnnnnnnnnnnnnnnnnnnnnnnnnnnnnnnnnnnnnnnnnnnnnnnnnnnnnnnnnnnnnnnnnnnnnnnnnnnnnnnnnnnnnnnnnnnnnnnnnnnnnnnnnnnnnnnnnnnnnnnnnnnnnnnnnnnnnnnnnnnnnnnnnnnnnnnnnnnnnnnnnnnnnnnnnnnnnnnnnnnnnnnnnnnnnnnnnnnnnnnnnnnnnnnnnnnnnnnnnnnnnnnnnnnnnnnnnnnnnnnnnnnnnnnnnnnnnnnnnnnnnnnnnnnnnnnnnnnnnnnnnnnnnnnnnnnnnnnnnnnnnnnnnnnnnnnnnnnnnnnnnnnnnnnnnnnnnnnnnnnnnnnnnnnnnnnnnnnnnnnnnnnnnnnnnnnnnnnnnnnnnnnnnnnnnnnnnnnnnnnnnnnnnnnnnnnnnnnnnnnnnnnnnnnnnnnnnnnnnnnnnnnnnnnnnnnnnnnnnnnnnnnnnnnnnnnnnnnnnnnnnnnnnnnnnnnnnnnnnnnnnnnnnnnnnnnnnnnnnnnnnnnnnnnnnnnnnnnnnnnnnnnnnnnnnnnnnnnnnnnnnnnnnnnnnnnnnnnnnnnnnnnnnnnnnnnnnnnnnnnnnnnnnnnnnnnnnnnnnnnnnnnnnnnnnnnnnnnnnnnnnnnnnnnnnnnnnnnnnnnnnnnnnnnnnnnnnnnnnnnnnnnnnnnnnnnnnnnnnnnnnnnnnnnnnnnnnnnnnnnnnnnnnnnnnnnnnnnnnnnnnnnnnnnnnnnnnnnnnnnnnnnnnnnnnnnnnnnnnnnnnnnnnnnnnnnnnnnnnnnnnnnnnnnnnnnnnnnnnnnnnnnnnnnnnnnnnnnnnnnnnnnnnnnnnnnnnnnnnnnnnnnnnnnnnnnnnnnnnnnnnnnnnnnnnnnnnnnnnnnnnnnnnnnnnnnnnnnnnnnnnnnnnnnnnnnnnnnnnnnnnnnnnnnnnnnnnnnnnnnnnnnnnnnnnnnnnnnnnnnnnnnnnnnnnnnnnnnnnnnnnnnnnnnnnnnnnnnnnnnnnnnnnnnnnnnnnnnnnnnnnnnnnnnnnnnnnnnnnnnnnnnnnnnnnnnnnnnnnnnnnnnnnnnnnnnnnnnnnnnnnnnnnnnnnnnnnnnnnnnnnnnnnnnnnnnnnnnnnnnnnnnnnnnnnnnnnnnnnnnnnnnnnnnnnnnnnnnnnnnnnnnnnnnnnnnnnnnnnnnnnnnnnnnnnnnnnnnnnnnnnnnnnnnnnnnnnnnnnnnnnnnnnnnnnnnnnnnnnnnnnnnnnnnnnnnnnnnnnnnnnnnnnnnnnnnnnnnnnnnnnnnnnnnnnnnnnnnnnnnnnnnnnnnnnnnnnnnnnnnnnnnnnnnnnnnnnnnnnnnnnnnnnnnnnnnnnnnnnnnnnnnnnnnnnnnnnnnnnnnnnnnnnnnnnnnnnnnnnnnnnnnnnnnnnnnnnnnnnnnnnnnnnnnnnnnnnnnnnnnnnnnnnnnnnnnnnnnnnnnnnnnnnnnnnnnnnnnnnnnnnnnnnnnnnnnnnnnnnnnnnnnnnnnnnnnnnnnnnnnnnnnnnnnnnnnnnnnnnnnnnnnnnnnnnnnnnnnnnnnnnnnnnnnnnnnnnnnnnnnnnnnnnnnnnnnnnnnnnnnnnnnnnnnnnnnnnnnnnnnnnnnnnnnnnnnnnnnnnnnnnnnnnnnnnnnnnnnnnnnnnnnnnnnnnnnnnnnnnnnnnnnnnnnnnnnnnnnnnnnnnnnnnnnnnnnnnnnnnnnnnnnnnnnnnnnnnnnnnnnnnnnnnnnnnnnnnnnnnnnnnnnnnnnnnnnnnnnnnnnnnnnnnnnnnnnnnnnnnnnnnnnnnnnnnnnnnnnnnnnnnnnnnnnnnnnnnnnnnnnnnnnnnnnnnnnnnnnnnnnnnnnnnnnnnnnnnnnnnnnnnnnnnnnnnnnnnnnnnnnnnnnnnnnnnnnnnnnnnnnnnnnnnnnnnnnnnnnnnnnnnnnnnnnnnnnnnnnnnnnnnnnnnnnnnnnnnnnnnnnnnnnnnnnnnnnnnnnnnnnnnnnnnnnnnnnnnnnnnnnnnnnnnnnnnnnnnnnnnnnnnnnnnnnnnnnnnnnnnnnnnnnnnnnnnnnnnnnnnnnnnnnnnnnnnnnnnnnnnnnnnnnnnnnnnnnnnnnnnnnnnnnnnnnnnnnnnnnnnnnnnnnnnnnnnnnnnnnnnnnnnnnnnnnnnnnnnnnnnnnnnnnnnnnnnnnnnnnnnnnnnnnnnnnnnnnnnnnnnnnnnnnnnnnnnnnnnnnnnnnnnnnnnnnnnnnnnnnnnnnnnnnnnnnnnnnnnnnnnnnnnnnnnnnnnnnnnnnnnnnnnnnnnnnnnnnnnnnnnnnnnnnnnnnnnnnnnnnnnnnnnnnnnnnnnnnnnnnnnnnnnnnnnnnnnnnnnnnnnnnnnnnnnnnnnnnnnnnnnnnnnnnnnnnnnnnnnnnnnnnnnnnnnnnnnnnnnnnnnnnnnnnnnnnnnnnnnnnnnnnnnnnnnnnnnnnnnnnnnnnnnnnnnnnnnnnnnnnnnnnnnnnnnnnnnnnnnnnnnnnnnnnnnnnnnnnnnnnnnnnnnnnnnnnnnnnnnnnnnnnnnnnnnnnnnnnnnnnnnnnnnnnnnnnnnnnnnnnnnnnnnnnnnnnnnnnnnnnnnnnnnnnnnnnnnnnnnnnnnnnnnnnnnnnnnnnnnnnnnnnnnnnnnnnnnnnnnnnnnnnnnnnnnnnnnnnnnnnnnnnnnnnnnnnnnnnnnnnnnnnnnnnnnnnnnnnnnnnnnnnnnnnnnnnnnnnnnnnnnnnnnnnnnnnnnnnnnnnnnnnnnnnnnnnnnnnnnnnnnnnnnnnnnnnnnnnnnnnnnnnnnnnnnnnnnnnnnnnnnnnnnnnnnnnnnnnnnnnnnnnnnnnnnnnnnnnnnnnnnnnnnnnnnnnnnnnnnnnnnnnnnnnnnnnnnnnnnnnnnnnnnnnnnnnnnnnnnnnnnnnnnnnnnnnnnnnnnnnnnnnnnnnnnnnnnnnnnnnnnnnnnnnnnnnnnnnnnnnnnnnnnnnnnnnnnnnnnnnnnnnnnnnnnnnnnnnnnnnnnnnnnnnnnnnnnnnnnnnnnnnnnnnnnnnnnnnnnnnnnnnnnnnnnnnnnnnnnnnnnnnnnnnnnnnnnnnnnnnnnnnnnnnnnnnnnnnnnnnnnnnnnnnnnnnnnnnnnnnnnnnnnnnnnnnnnnnnnnnnnnnnnnnnnnnnnnnnnnnnnnnnnnnnnnnnnnnnnnnnnnnnnnnnnnnnnnnnnnnnnnnnnnnnnnnnnnnnnnnnnnnnnnnnnnnnnnnnnnnnnnnnnnnnnnnnnnnnnnnnnnnnnnnnnnnnnnnnnnnnnnnnnnnnnnnnnnnnnnnnnnnnnnnnnnnnnnnnnnnnnnnnnnnnnnnnnnnnnnnnnnnnnnnnnnnnnnnnnnnnnnnnnnnnnnnnnnnnnnnnnnnnnnnnnnnnnnnnnnnnnnnnnnnnnnnnnnnnnnnnnnnnnnnnnnnnnnnnnnnnnnnnnnnnnnnnnnnnnnnnnnnnnnnnnnnnnnnnnnnnnnnnnnnnnnnnnnnnnnnnnnnnnnnnnnnnnnnnnnnnnnnnnnnnnnnnnnnnnnnnnnnnnnnnnnnnnnnnnnnnnnnnnnnnnnnnnnnnnnnnnnnnnnnnnnnnnnnnnnnnnnnnnnnnnnnnnnnnnnnnnnnnnnnnnnnnnnnnnnnnnnnnnnnnnnnnnnnnnnnnnnnnnnnnnnnnnnnnnnnnnnnnnnnnnnnnnnnnnnnnnnnnnnnnnnnnnnnnnnnnnnnnnnnnnnnnnnnnnnnnnnnnnnnnnnnnnnnnnnnnnnnnnnnnnnnnnnnnnnnnnnnnnnnnnnnnnnnnnnnnnnnnnnnnnnnnnnnnnnnnnnnnnnnnnnnnnnnnnnnnnnnnnnnnnnnnnnnnnnnnnnnnnnnnnnnnnnnnnnnnnnnnnnnnnnnnnnnnnnnnnnnnnnnnnnnnnnnnnnnnnnnnnnnnnnnnnnnnnnnnnnnnnnnnnnnnnnnnnnnnnnnnnnnnnnnnnnnnnnnnnnnnnnnnnnnnnnnnnnnnnnnnnnnnnnnnnnnnnnnnnnnnnnnnnnnnnnnnnnnnnnnnnnnnnnnnnnnnnnnnnnnnnnnnnnnnnnnnnnnnnnnnnnnnnnnnnnnnnnnnnnnnnnnnnnnnnnnnnnnnnnnnnnnnnnnnnnnnnnnnnnnnnnnnnnnnnnnnnnnnnnnnnnnnnnnnnnnnnnnnnnnnnnnnnnnnnnnnnnnnnnnnnnnnnnnnnnnnnnnnnnnnnnnnnnnnnnnnnnnnnnnnnnnnnnnnnnnnnnnnnnnnnnnnnnnnnnnnnnnnnnnnnnnnnnnnnnnnnnnnnnnnnnnnnnnnnnnnnnnnnnnnnnnnnnnnnnnnnnnnnnnnnnnnnnnnnnnnnnnnnnnnnnnnnnnnnnnnnnnnnnnnnnnnnnnnnnnnnnnnnnnnnnnnnnnnnnnnnnnnnnnnnnnnnnnnnnnnnnnnnnnnnnnnnnnnnnnnnnnnnnnnnnnnnnnnnnnnnnnnnnnnnnnnnnnnnnnnnnnnnnnnnnnnnnnnnnnnnnnnnnnnnnnnnnnnnnnnnnnnnnnnnnnnnnnnnnnnnnnnnnnnnnnnnnnnnnnnnnnnnnnnnnnnnnnnnnnnnnnnnnnnnnnnnnnnnnnnnnnnnnnnnnnnnnnnnnnnnnnnnnnnnnnnnnnnnnnnnnnnnnnnnnnnnnnnnnnnnnnnnnnnnnnnnnnnnnnnnnnnnnnnnnnnnnnnnnnnnnnnnnnnnnnnnnnnnnnnnnnnnnnnnnnnnnnnnnnnnnnnnnnnnnnnnnnnnnnnnnnnnnnnnnnnnnnnnnnnnnnnnnnnnnnnnnnnnnnnnnnnnnnnnnnnnnnnnnnnnnnnnnnnnnnnnnnnnnnnnnnnnnnnnnnnnnnnnnnnnnnnnnnnnnnnnnnnnnnnnnnnnnnnnnnnnnnnnnnnnnnnnnnnnnnnnnnnnnnnnnnnnnnnnnnnnnnnnnnnnnnnnnnnnnnnnnnnnnnnnnnnnnnnnnnnnnnnnnnnnnnnnnnnnnnnnnnnnnnnnnnnnnnnnnnnnnnnnnnnnnnnnnnnnnnnnnnnnnnnnnnnnnnnnnnnnnnnnnnnnnnnnnnnnnnnnnnnnnnnnnnnnnnnnnnnnnnnnnnnnnnnnnnnnnnnnnnnnnnnnnnnnnnnnnnnnnnnnnnnnnnnnnnnnnnnnnnnnnnnnnnnnnnnnnnnnnnnnnnnnnnnnnnnnnnnnnnnnnnnnnnnnnnnnnnnnnnnnnnnnnnnnnnnnnnnnnnnnnnnnnnnnnnnnnnnnnnnnnnnnnnnnnnnnnnnnnnnnnnnnnnnnnnnnnnnnnnnnnnnnnnnnnnnnnnnnnnnnnnnnnnnnnnnnnnnnnnnnnnnnnnnnnnnnnnnnnnnnnnnnnnnnnnnnnnnnnnnnnnnnnnnnnnnnnnnnnnnnnnnnnnnnnnnnnnnnnnnnnnnnnnnnnnnnnnnnnnnnnnnnnnnnnnnnnnnnnnnnnnnnnnnnnnnnnnnnnnnnnnnnnnnnnnnnnnnnnnnnnnnnnnnnnnnnnnnnnnnnnnnnnnnnnnnnnnnnnnnnnnnnnnnnnnnnnnnnnnnnnnnnnnnnnnnnnnnnnnnnnnnnnnnnnnnnnnnnnnnnnnnnnnnnnnnnnnnnnnnnnnnnnnnnnnnnnnnnnnnnnnnnnnnnnnnnnnnnnnnnnnnnnnnnnnnnnnnnnnnnnnnnnnnnnnnnnnnnnnnnnnnnnnnnnnnnnnnnnnnnnnnnnnnnnnnnnnnnnnnnnnnnnnnnnnnnnnnnnnnnnnnnnnnnnnnnnnnnnnnnnnnnnnnnnnnnnnnnnnnnnnnnnnnnnnnnnnnnnnnnnnnnnnnnnnnnnnnnnnnnnnnnnnnnnnnnnnnnnnnnnnnnnnnnnnnnnnnnnnnnnnnnnnnnnnnnnnnnnnnnnnnnnnnnnnnnnnnnnnnnnnnnnnnnnnnnnnnnnnnnnnnnnnnnnnnnnnnnnnnnnnnnnnnnnnnnnnnnnnnnnnnnnnnnnnnnnnnnnnnnnnnnnnnnnnnnnnnnnnnnnnnnnnnnnnnnnnnnnnnnnnnnnnnnnnnnnnnnnnnnnnnnnnnnnnnnnnnnnnnnnnnnnnnnnnnnnnnnnnnnnnnnnnnnnnnnnnnnnnnnnnnnnnnnnnnnnnnnnnnnnnnnnnnnnnnnnnnnnnnnnnnnnnnnnnnnnnnnnnnnnnnnnnnnnnnnnnnnnnnnnnnnnnnnnnnnnnnnnnnnnnnnnnnnnnnnnnnnnnnnnnnnnnnnnnnnnnnnnnnnnnnnnnnnnnnnnnnnnnnnnnnnnnnnnnnnnnnnnnnnnnnnnnnnnnnnnnnnnnnnnnnnnnnnnnnnnnnnnnnnnnnnnnnnnnnnnnnnnnnnnnnnnnnnnnnnnnnnnnnnnnnnnnnnnnnnnnnnnnnnnnnnnnnnnnnnnnnnnnnnnnnnnnnnnnnnnnnnnnnnnnnnnnnnnnnnnnnnnnnnnnnnnnnnnnnnnnnnnnnnnnnnnnnnnnnnnnnnnnnnnnnnnnnnnnnnnnnnnnnnnnnnnnnnnnnnnnnnnnnnnnnnnnnnnnnnnnnnnnnnnnnnnnnnnnnnnnnnnnnnnnnnnnnnnnnnnnnnnnnnnnnnnnnnnnnnnnnnnnnnnnnnnnnnnnnnnnnnnnnnnnnnnnnnnnnnnnnnnnnnnnnnnnnnnnnnnnnnnnnnnnnnnnnnnnnnnnnnnnnnnnnnnnnnnnnnnnnnnnnnnnnnnnnnnnnnnnnnnnnnnnnnnnnnnnnnnnnnnnnnnnnnnnnnnnnnnnnnnnnnnnnnnnnnnnnnnnnnnnnnnnnnnnnnnnnnnnnnnnnnnnnnnnnnnnnnnnnnnnnnnnnnnnnnnnnnnnnnnnnnnnnnnnnnnnnnnnnnnnnnnnnnnnnnnnnnnnnnnnnnnnnnnnnnnnnnnnnnnnnnnnnnnnnnnnnnnnnnnnnnnnnnnnnnnnnnnnnnnnnnnnnnnnnnnnnnnnnnnnnnnnnnnnnnnnnnnnnnnnnnnnnnnnnnnnnnnnnnnnnnnnnnnnnnnnnnnnnnnnnnnnnnnnnnnnnnnnnnnnnnnnnnnnnnnnnnnnnnnnnnnnnnnnnnnnnnnnnnnnnnnnnnnnnnnnnnnnnnnnnnnnnnnnnnnnnnnnnnnnnnnnnnnnnnnnnnnnnnnnnnnnnnnnnnnnnnnnnnnnnnnnnnnnnnnnnnnnnnnnnnnnnnnnnnnnnnnnnnnnnnnnnnnnnnnnnnnnnnnnnnnnnnnnnnnnnnnnnnnnnnnnnnnnnnnnnnnnnnnnnnnnnnnnnnnnnnnnnnnnnnnnnnnnnnnnnnnnnnnnnnnnnnnnnnnnnnnnnnnnnnnnnnnnnnnnnnnnnnnnnnnnnnnnnnnnnnnnnnnnnnnnnnnnnnnnnnnnnnnnnnnnnnnnnnnnnnnnnnnnnnnnnnnnnnnnnnnnnnnnnnnnnnnnnnnnnnnnnnnnnnnnnnnnnnnnnnnnnnnnnnnnnnnnnnnnnnnnnnnnnnnnnnnnnnnnnnnnnnnnnnnnnnnnnnnnnnnnnnnnnnnnnnnnnnnnnnnnnnnnnnnnnnnnnnnnnnnnnnnnnnnnnnnnnnnnnnnnnnnnnnnnnnnnnnnnnnnnnnnnnnnnnnnnnnnnnnnnnnnnnnnnnnnnnnnnnnnnnnnnnnnnnnnnnnnnnnnnnnnnnnnnnnnnnnnnnnnnnnnnnnnnnnnnnnnnnnnnnnnnnnnnnnnnnnnnnnnnnnnnnnnnnnnnnnnnnnnnnnnnnnnnnnnnnnnnnnnnnnnnnnnnnnnnnnnnnnnnnnnnnnnnnnnnnnnnnnnnnnnnnnnnnnnnnnnnnnnnnnnnnnnnnnnnnnnnnnnnnnnnnnnnnnnnnnnnnnnnnnnnnnnnnnnnnnnnnnnnnnnnnnnnnnnnnnnnnnnnnnnnnnnnnnnnnnnnnnnnnnnnnnnnnnnnnnnnnnnnnnnnnnnnnnnnnnnnnnnnnnnnnnnnnnnnnnnnnnnnnnnnnnnnnnnnnnnnnnnnnnnnnnnnnnnnnnnnnnnnnnnnnnnnnnnnnnnnnnnnnnnnnnnnnnnnnnnnnnnnnnnnnnnnnnnnnnnnnnnnnnnnnnnnnnnnnnnnnnnnnnnnnnnnnnnnnnnnnnnnnnnnnnnnnnnnnnnnnnnnnnnnnnnnnnnnnnnnnnnnnnnnnnnnnnnnnnnnnnnnnnnnnnnnnnnnnnnnnnnnnnnnnnnnnnnnnnnnnnnnnnnnnnnnnnnnnnnnnnnnnnnnnnnnnnnnnnnnnnnnnnnnnnnnnnnnnnnnnnnnnnnnnnnnnnnnnnnnnnnnnnnnnnnnnnnnnnnnnnnnnnnnnnnnnnnnnnnnnnnnnnnnnnnnnnnnnnnnnnnnnnnnnnnnnnnnnnnnnnnnnnnnnnnnnnnnnnnnnnnnnnnnnnnnnnnnnnnnnnnnnnnnnnnnnnnnnnnnnnnnnnnnnnnnnnnnnnnnnnnnnnnnnnnnnnnnnnnnnnnnnnnnnnnnnnnnnnnnnnnnnnnnnnnnnnnnnnnnnnnnnnnnnnnnnnnnnnnnnnnnnnnnnnnnnnnnnnnnnnnnnnnnnnnnnnnnnnnnnnnnnnnnnnnnnnnnnnnnnnnnnnnnnnnnnnnnnnnnnnnnnnnnnnnnnnnnnnnnnnnnnnnnnnnnnnnnnnnnnnnnnnnnnnnnnnnnnnnnnnnnnnnnnnnnnnnnnnnnnnnnnnnnnnnnnnnnnnnnnnnnnnnnnnnnnnnnnnnnnnnnnnnnnnnnnnnnnnnnnnnnnnnnnnnnnnnnnnnnnnnnnnnnnnnnnnnnnnnnnnnnnnnnnnnnnnnnnnnnnnnnnnnnnnnnnnnnnnnnnnnnnnnnnnnnnnnnnnnnnnnnnnnnnnnnnnnnnnnnnnnnnnnnnnnnnnnnnnnnnnnnnnnnnnnnnnnnnnnnnnnnnnnnnnnnnnnnnnnnnnnnnnnnnnnnnnnnnnnnnnnnnnnnnnnnnnnnnnnnnnnnnnnnnnnnnnnnnnnnnnnnnnnnnnnnnnnnnnnnnnnnnnnnnnnnnnnnnnnnnnnnnnnnnnnnnnnnnnnnnnnnnnnnnnnnnnnnnnnnnnnnnnnnnnnnnnnnnnnnnnnnnnnnnnnnnnnnnnnnnnnnnnnnnnnnnnnnnnnnnnnnnnnnnnnnnnnnnnnnnnnnnnnnnnnnnnnnnnnnnnnnnnnnnnnnnnnnnnnnnnnnnnnnnnnnnnnnnnnnnnnnnnnnnnnnnnnnnnnnnnnnnnnnnnnnnnnnnnnnnnnnnnnnnnnnnnnnnnnnnnnnnnnnnnnnnnnnnnnnnnnnnnnnnnnnnnnnnnnnnnnnnnnnnnnnnnnnnnnnnnnnnnnnnnnnnnnnnnnnnnnnnnnnnnnnnnnnnnnnnnnnnnnnnnnnnnnnnnnnnnnnnnnnnnnnnnnnnnnnnnnnnnnnnnnnnnnnnnnnnnnnnnnnnnnnnnnnnnnnnnnnnnnnnnnnnnnnnnnnnnnnnnnnnnnnnnnnnnnnnnnnnnnnnnnnnnnnnnnnnnnnnnnnnnnnnnnnnnnnnnnnnnnnnnnnnnnnnnnnnnnnnnnnnnnnnnnnnnnnnnnnnnnnnnnnnnnnnnnnnnnnnnnnnnnnnnnnnnnnnnnnnnnnnnnnnnnnnnnnnnnnnnnnnnnnnnnnnnnnnnnnnnnnnnnnnnnnnnnnnnnnnnnnnnnnnnnnnnnnnnnnnnnnnnnnnnnnnnnnnnnnnnnnnnnnnnnnnnnnnnnnnnnnnnnnnnnnnnnnnnnnnnnnnnnnnnnnnnnnnnnnnnnnnnnnnnnnnnnnnnnnnnnnnnnnnnnnnnnnnnnnnnnnnnnnnnnnnnnnnnnnnnnnnnnnnnnnnnnnnnnnnnnnnnnnnnnnnnnnnnnnnnnnnnnnnnnnnnnnnnnnnnnnnnnnnnnnnnnnnnnnnnnnnnnnnnnnnnnnnnnnnnnnnnnnnnnnnnnnnnnnnnnnnnnnnnnnnnnnnnnnnnnnnnnnnnnnnnnnnnnnnnnnnnnnnnnnnnnnnnnnnnnnnnnnnnnnnnnnnnnnnnnnnnnnnnnnnnnnnnnnnnnnnnnnnnnnnnnnnnnnnnnnnnnnnnnnnnnnnnnnnnnnnnnnnnnnnnnnnnnnnnnnnnnnnnnnnnnnnnnnnnnnnnnnnnnnnnnnnnnnnnnnnnnnnnnnnnnnnnnnnnnnnnnnnnnnnnnnnnnnnnnnnnnnnnnnnnnnnnnnnnnnnnnnnnnnnnnnnnnnnnnnnnnnnnnnnnnnnnnnnnnnnnnnnnnnnnnnnnnnnnnnnnnnnnnnnnnnnnnnnnnnnnnnnnnnnnnnnnnnnnnnnnnnnnnnnnnnnnnnnnnnnnnnnnnnnnnnnnnnnnnnnnnnnnnnnnnnnnnnnnnnnnnnnnnnnnnnnnnnnnnnnnnnnnnnnnnnnnnnnnnnnnnnnnnnnnnnnnnnnnnnnnnnnnnnnnnnnnnnnnnnnnnnnnnnnnnnnnnnnnnnnnnnnnnnnnnnnnnnnnnnnnnnnnnnnnnnnnnnnnnnnnnnnnnnnnnnnnnnnnnnnnnnnnnnnnnnnnnnnnnnnnnnnnnnnnnnnnnnnnnnnnnnnnnnnnnnnnnnnnnnnnnnnnnnnnnnnnnnnnnnnnnnnnnnnnnnnnnnnnnnnnnnnnnnnnnnnnnnnnnnnnnnnnnnnnnnnnnnnnnnnnnnnnnnnnnnnnnnnnnnnnnnnnnnnnnnnnnnnnnnnnnnnnnnnnnnnnnnnnnnnnnnnnnnnnnnnnnnnnnnnnnnnnnnnnnnnnnnnnnnnnnnnnnnnnnnnnnnnnnnnnnnnnnnnnnnnnnnnnnnnnnnnnnnnnnnnnnnnnnnnnnnnnnnnnnnnnnnnnnnnnnnnnnnnnnnnnnnnnnnnnnnnnnnnnnnnnnnnnnnnnnnnnnnnnnnnnnnnnnnnnnnnnnnnnnnnnnnnnnnnnnnnnnnnnnnnnnnnnnnnnnnnnnnnnnnnnnnnnnnnnnnnnnnnnnnnnnnnnnnnnnnnnnnnnnnnnnnnnnnnnnnnnnnnnnnnnnnnnnnnnnnnnnnnnnnnnnnnnnnnnnnnnnnnnnnnnnnnnnnnnnnnnnnnnnnnnnnnnnnnnnnnnnnnnnnnnnnnnnnnnnnnnnnnnnnnnnnnnnnnnnnnnnnnnnnnnnnnnnnnnnnnnnnnnnnnnnnnnnnnnnnnnnnnnnnnnnnnnnnnnnnnnnnnnnnnnnnnnnnnnnnnnnnnnnnnnnnnnnnnnnnnnnnnnnnnnnnnnnnnnnnnnnnnnnnnnnnnnnnnnnnnnnnnnnnnnnnnnnnnnnnnnnnnnnnnnnnnnnnnnnnnnnnnnnnnnnnnnnnnnnnnnnnnnnnnnnnnnnnnnnnnnnnnnnnnnnnnnnnnnnnnnnnnnnnnnnnnnnnnnnnnnnnnnnnnnnnnnnnnnnnnnnnnnnnnnnnnnnnnnnnnnnnnnnnnnnnnnnnnnnnnnnnnnnnnnnnnnnnnnnnnnnnnnnnnnnnnnnnnnnnnnnnnnnnnnnnnnnnnnnnnnnnnnnnnnnnnnnnnnnnnnnnnnnnnnnnnnnnnnnnnnnnnnnnnnnnnnnnnnnnnnnnnnnnnnnnnnnnnnnnnnnnnnnnnnnnnnnnnnnnnnnnnnnnnnnnnnnnnnnnnnnnnnnnnnnnnnnnnnnnnnnnnnnnnnnnnnnnnnnnnnnnnnnnnnnnnnnnnnnnnnnnnnnnnnnnnnnnnnnnnnnnnnnnnnnnnnnnnnnnnnnnnnnnnnnnnnnnnnnnnnnnnnnnnnnnnnnnnnnnnnnnnnnnnnnnnnnnnnnnnnnnnnnnnnnnnnnnnnnnnnnnnnnnnnnnnnnnnnnnnnnnnnnnnnnnnnnnnnnnnnnnnnnnnnnnnnnnnnnnnnnnnnnnnnnnnnnnnnnnnnnnnnnnnnnnnnnnnnnnnnnnnnnnnnnnnnnnnnnnnnnnnnnnnnnnnnnnnnnnnnnnnnnnnnnnnnnnnnnnnnnnnnnnnnnnnnnnnnnnnnnnnnnnnnnnnnnnnnnnnnnnnnnnnnnnnnnnnnnnnnnnnnnnnnnnnnnnnnnnnnnnnnnnnnnnnnnnnnnnnnnnnnnnnnnnnnnnnnnnnnnnnnnnnnnnnnnnnnnnnnnnnnnnnnnnnnnnnnnnnnnnnnnnnnnnnnnnnnnnnnnnnnnnnnnnnnnnnnnnnnnnnnnnnnnnnnnnnnnnnnnnnnnnnnnnnnnnnnnnnnnnnnnnnnnnnnnnnnnnnnnnnnnnnnnnnnnnnnnnnnnnnnnnnnnnnnnnnnnnnnnnnnnnnnnnnnnnnnnnnnnnnnnnnnnnnnnnnnnnnnnnnnnnnnnnnnnnnnnnnnnnnnnnnnnnnnnnnnnnnnnnnnnnnnnnnnnnnnnnnnnnnnnnnnnnnnnnnnnnnnnnnnnnnnnnnnnnnnnnnnnnnnnnnnnnnnnnnnnnnnnnnnnnnnnnnnnnnnnnnnnnnnnnnnnnnnnnnnnnnnnnnnnnnnnnnnnnnnnnnnnnnnnnnnnnnnnnnnnnnnnnnnnnnnnnnnnnnnnnnnnnnnnnnnnnnnnnnnnnnnnnnnnnnnnnnnnnnnnnnnnnnnnnnnnnnnnnnnnnnnnnnnnnnnnnnnnnnnnnnnnnnnnnnnnnnnnnnnnnnnnnnnnnnnnnnnnnnnnnnnnnnnnnnnnnnnnnnnnnnnnnnnnnnnnnnnnnnnnnnnnnnnnnnnnnnnnnnnnnnnnnnnnnnnnnnnnnnnnnnnnnnnnnnnnnnnnnnnnnnnnnnnnnnnnnnnnnnnnnnnnnnnnnnnnnnnnnnnnnnnnnnnnnnnnnnnnnnnnnnnnnnnnnnnnnnnnnnnnnnnnnnnnnnnnnnnnnnnnnnnnnnnnnnnnnnnnnnnnnnnnnnnnnnnnnnnnnnnnnnnnnnnnnnnnnnnnnnnnnnnnnnnnnnnnnnnnnnnnnnnnnnnnnnnnnnnnnnnnnnnnnnnnnnnnnnnnnnnnnnnnnnnnnnnnnnnnnnnnnnnnnnnnnnnnnnnnnnnnnnnnnnnnnnnnnnnnnnnnnnnnnnnnnnnnnnnnnnnnnnnnnnnnnnnnnnnnnnnnnnnnnnnnnnnnnnnnnnnnnnnnnnnnnnnnnnnnnnnnnnnnnnnnnnnnnnnnnnnnnnnnnnnnnnnnnnnnnnnnnnnnnnnnnnnnnnnnnnnnnnnnnnnnnnnnnnnnnnnnnnnnnnnnnnnnnnnnnnnnnnnnnnnnnnnnnnnnnnnnnnnnnnnnnnnnnnnnnnnnnnnnnnnnnnnnnnnnnnnnnnnnnnnnnnnnnnnnnnnnnnnnnnnnnnnnnnnnnnnnnnnnnnnnnnnnnnnnnnnnnnnnnnnnnnnnnnnnnnnnnnnnnnnnnnnnnnnnnnnnnnnnnnnnnnnnnnnnnnnnnnnnnnnnnnnnnnnnnnnnnnnnnnnnnnnnnnnnnnnnnnnnnnnnnnnnnnnnnnnnnnnnnnnnnnnnnnnnnnnnnnnnnnnnnnnnnnnnnnnnnnnnnnnnnnnnnnnnnnnnnnnnnnnnnnnnnnnnnnnnnnnnnnnnnnnnnnnnnnnnnnnnnnnnnnnnnnnnnnnnnnnnnnnnnnnnnnnnnnnnnnnnnnnnnnnnnnnnnnnnnnnnnnnnnnnnnnnnnnnnnnnnnnnnnnnnnnnnnnnnnnnnnnnnnnnnnnnnnnnnnnnnnnnnnnnnnnnnnnnnnnnnnnnnnnnnnnnnnnnnnnnnnnnnnnnnnnnnnnnnnnnnnnnnnnnnnnnnnnnnnnnnnnnnnnnnnnnnnnnnnnnnnnnnnnnnnnnnnnnnnnnnnnnnnnnnnnnnnnnnnnnnnnnnnnnnnnnnnnnnnnnnnnnnnnnnnnnnnnnnnnnnnnnnnnnnnnnnnnnnnnnnnnnnnnnnnnnnnnnnnnnnnnnnnnnnnnnnnnnnnnnnnnnnnnnnnnnnnnnnnnnnnnnnnnnnnnnnnnnnnnnnnnnnnnnnnnnnnnnnnnnnnnnnnnnnnnnnnnnnnnnnnnnnnnnnnnnnnnnnnnnnnnnnnnnnnnnnnnnnnnnnnnnnnnnnnnnnnnnnnnnnnnnnnnnnnnnnnnnnnnnnnnnnnnnnnnnnnnnnnnnnnnnnnnnnnnnnnnnnnnnnnnnnnnnnnnnnnnnnnnnnnnnnnnnnnnnnnnnnnnnnnnnnnnnnnnnnnnnnnnnnnnnnnnnnnnnnnnnnnnnnnnnnnnnnnnnnnnnnnnnnnnnnnnnnnnnnnnnnnnnnnnnnnnnnnnnnnnnnnnnnnnnnnnnnnnnnnnnnnnnnnnnnnnnnnnnnnnnnnnnnnnnnnnnnnnnnnnnnnnnnnnnnnnnnnnnnnnnnnnnnnnnnnnnnnnnnnnnnnnnnnnnnnnnnnnnnnnnnnnnnnnnnnnnnnnnnnnnnnnnnnnnnnnnnnnnnnnnnnnnnnnnnnnnnnnnnnnnnnnnnnnnnnnnnnnnnnnnnnnnnnnnnnnnnnnnnnnnnnnnnnnnnnnnnnnnnnnnnnnnnnnnnnnnnnnnnnnnnnnnnnnnnnnnnnnnnnnnnnnnnnnnnnnnnnnnnnnnnnnnnnnnnnnnnnnnnnnnnnnnnnnnnnnnnnnnnnnnnnnnnnnnnnnnnnnnnnnnnnnnnnnnnnnnnnnnnnnnnnnnnnnnnnnnnnnnnnnnnnnnnnnnnnnnnnnnnnnnnnnnnnnnnnnnnnnnnnnnnnnnnnnnnnnnnnnnnnnnnnnnnnnnnnnnnnnnnnnnnnnnnnnnnnnnnnnnnnnnnnnnnnnnnnnnnnnnnnnnnnnnnnnnnnnnnnnnnnnnnnnnnnnnnnnnnnnnnnnnnnnnnnnnnnnnnnnnnnnnnnnnnnnnnnnnnnnnnnnnnnnnnnnnnnnnnnnnnnnnnnnnnnnnnnnnnnnnnnnnnnnnnnnnnnnnnnnnnnnnnnnnnnnnnnnnnnnnnnnnnnnnnnnnnnnnnnnnnnnnnnnnnnnnnnnnnnnnnnnnnnnnnnnnnnnnnnnnnnnnnnnnnnnnnnnnnnnnnnnnnnnnnnnnnnnnnnnnnnnnnnnnnnnnnnnnnnnnnnnnnnnnnnnnnnnnnnnnnnnnnnnnnnnnnnnnnnnnnnnnnnnnnnnnnnnnnnnnnnnnnnnnnnnnnnnnnnnnnnnnnnnnnnnnnnnnnnnnnnnnnnnnnnnnnnnnnnnnnnnnnnnnnnnnnnnnnnnnnnnnnnnnnnnnnnnnnnnnnnnnnnnnnnnnnnnnnnnnnnnnnnnnnnnnnnnnnnnnnnnnnnnnnnnnnnnnnnnnnnnnnnnnnnnnnnnnnnnnnnnnnnnnnnnnnnnnnnnnnnnnnnnnnnnnnnnnnnnnnnnnnnnnnnnnnnnnnnnnnnnnnnnnnnnnnnnnnnnnnnnnnnnnnnnnnnnnnnnnnnnnnnnnnnnnnnnnnnnnnnnnnnnnnnnnnnnnnnnnnnnnnnnnnnnnnnnnnnnnnnnnnnnnnnnnnnnnnnnnnnnnnnnnnnnnnnnnnnnnnnnnnnnnnnnnnnnnnnnnnnnnnnnnnnnnnnnnnnnnnnnnnnnnnnnnnnnnnnnnnnnnnnnnnnnnnnnnnnnnnnnnnnnnnnnnnnnnnnnnnnnnnnnnnnnnnnnnnnnnnnnnnnnnnnnnnnnnnnnnnnnnnnnnnnnnnnnnnnnnnnnnnnnnnnnnnnnnnnnnnnnnnnnnnnnnnnnnnnnnnnnnnnnnnnnnnnnnnnnnnnnnnnnnnnnnnnnnnnnnnnnnnnnnnnnnnnnnnnnnnnnnnnnnnnnnnnnnnnnnnnnnnnnnnnnnnnnnnnnnnnnnnnnnnnnnnnnnnnnnnnnnnnnnnnnnnnnnnnnnnnnnnnnnnnnnnnnnnnnnnnnnnnnnnnnnnnnnnnnnnnnnnnnnnnnnnnnnnnnnnnnnnnnnnnnnnnnnnnnnnnnnnnnnnnnnnnnnnnnnnnnnnnnnnnnnnnnnnnnnnnnnnnnnnnnnnnnnnnnnnnnnnnnnnnnnnnnnnnnnnnnnnnnnnnnnnnnnnnnnnnnnnnnnnnnnnnnnnnnnnnnnnnnnnnnnnnnnnnnnnnnnnnnnnnnnnnnnnnnnnnnnnnnnnnnnnnnnnnnnnnnnnnnnnnnnnnnnnnnnnnnnnnnnnnnnnnnnnnnnnnnnnnnnnnnnnnnnnnnnnnnnnnnnnnnnnnnnnnnnnnnnnnnnnnnnnnnnnnnnnnnnnnnnnnnnnnnnnnnnnnnnnnnnnnnnnnnnnnnnnnnnnnnnnnnnnnnnnnnnnnnnnnnnnnnnnnnnnnnnnnnnnnnnnnnnnnnnnnnnnnnnnnnnnnnnnnnnnnnnnnnnnnnnnnnnnnnnnnnnnnnnnnnnnnnnnnnnnnnnnnnnnnnnnnnnnnnnnnnnnnnnnnnnnnnnnnnnnnnnnnnnnnnnnnnnnnnnnnnnnnnnnnnnnnnnnnnnnnnnnnnnnnnnnnnnnnnnnnnnnnnnnnnnnnnnnnnnnnnnnnnnnnnnnnnnnnnnnnnnnnnnnnnnnnnnnnnnnnnnnnnnnnnnnnnnnnnnnnnnnnnnnnnnnnnnnnnnnnnnnnnnnnnnnnnnnnnnnnnnnnnnnnnnnnnnnnnnnnnnnnnnnnnnnnnnnnnnnnnnnnnnnnnnnnnnnnnnnnnnnnnnnnnnnnnnnnnnnnnnnnnnnnnnnnnnnnnnnnnnnnnnnnnnnnnnnnnnnnnnnnnnnnnnnnnnnnnnnnnnnnnnnnnnnnnnnnnnnnnnnnnnnnnnnnnnnnnnnnnnnnnnnnnnnnnnnnnnnnnnnnnnnnnnnnnnnnnnnnnnnnnnnnnnnnnnnnnnnnnnnnnnnnnnnnnnnnnnnnnnnnnnnnnnnnnnnnnnnnnnnnnnnnnnnnnnnnnnnnnnnnnnnnnnnnnnnnnnnnnnnnnnnnnnnnnnnnnnnnnnnnnnnnnnnnnnnnnnnnnnnnnnnnnnnnnnnnnnnnnnnnnnnnnnnnnnnnnnnnnnnnnnnnnnnnnnnnnnnnnnnnnnnnnnnnnnnnnnnnnnnnnnnnnnnnnnnnnnnnnnnnnnnnnnnnnnnnnnnnnnnnnnnnnnnnnnnnnnnnnnnnnnnnnnnnnnnnnnnnnnnnnnnnnnnnnnnnnnnnnnnnnnnnnnnnnnnnnnnnnnnnnnnnnnnnnnnnnnnnnnnnnnnnnnnnnnnnnnnnnnnnnnnnnnnnnnnnnnnnnnnnnnnnnnnnnnnnnnnnnnnnnnnnnnnnnnnnnnnnnnnnnnnnnnnnnnnnnnnnnnnnnnnnnnnnnnnnnnnnnnnnnnnnnnnnnnnnnnnnnnnnnnnnnnnnnnnnnnnnnnnnnnnnnnnnnnnnnnnnnnnnnnnnnnnnnnnnnnnnnnnnnnnnnnnnnnnnnnnnnnnnnnnnnnnnnnnnnnnnnnnnnnnnnnnnnnnnnnnnnnnnnnnnnnnnnnnnnnnnnnnnnnnnnnnnnnnnnnnnnnnnnnnnnnnnnnnnnnnnnnnnnnnnnnnnnnnnnnnnnnnnnnnnnnnnnnnnnnnnnnnnnnnnnnnnnnnnnnnnnnnnnnnnnnnnnnnnnnnnnnnnnnnnnnnnnnnnnnnnnnnnnnnnnnnnnnnnnnnnnnnnnnnnnnnnnnnnnnnnnnnnnnnnnnnnnnnnnnnnnnnnnnnnnnnnnnnnnnnnnnnnnnnnnnnnnnnnnnnnnnnnnnnnnnnnnnnnnnnnnnnnnnnnnnnnnnnnnnnnnnnnnnnnnnnnnnnnnnnnnnnnnnnnnnnnnnnnnnnnnnnnnnnnnnnnnnnnnnnnnnnnnnnnnnnnnnnnnnnnnnnnnnnnnnnnnnnnnnnnnnnnnnnnnnnnnnnnnnnnnnnnnnnnnnnnnnnnnnnnnnnnnnnnnnnnnnnnnnnnnnnnnnnnnnnnnnnnnnnnnnnnnnnnnnnnnnnnnnnnnnnnnnnnnnnnnnnnnnnnnnnnnnnnnnnnnnnnnnnnnnnnnnnnnnnnnnnnnnnnnnnnnnnnnnnnnnnnnnnnnnnnnnnnnnnnnnnnnnnnnnnnnnnnnnnnnnnnnnnnnnnnnnnnnnnnnnnnnnnnnnnnnnnnnnnnnnnnnnnnnnnnnnnnnnnnnnnnnnnnnnnnnnnnnnnnnnnnnnnnnnnnnnnnnnnnnnnnnnnnnnnnnnnnnnnnnnnnnnnnnnnnnnnnnnnnnnnnnnnnnnnnnnnnnnnnnnnnnnnnnnnnnnnnnnnnnnnnnnnnnnnnnnnnnnnnnnnnnnnnnnnnnnnnnnnnnnnnnnnnnnnnnnnnnnnnnnnnnnnnnnnnnnnnnnnnnnnnnnnnnnnnnnnnnnnnnnnnnnnnnnnnnnnnnnnnnnnnnnnnnnnnnnnnnnnnnnnnnnnnnnnnnnnnnnnnnnnnnnnnnnnnnnnnnnnnnnnnnnnnnnnnnnnnnnnnnnnnnnnnnnnnnnnnnnnnnnnnnnnnnnnnnnnnnnnnnnnnnnnnnnnnnnnnnnnnnnnnnnnnnnnnnnnnnnnnnnnnnnnnnnnnnnnnnnnnnnnnnnnnnnnnnnnnnnnnnnnnnnnnnnnnnnnnnnnnnnnnnnnnnnnnnnnnnnnnnnnnnnnnnnnnnnnnnnnnnnnnnnnnnnnnnnnnnnnnnnnnnnnnnnnnnnnnnnnnnnnnnnnnnnnnnnnnnnnnnnnnnnnnnnnnnnnnnnnnnnnnnnnnnnnnnnnnnnnnnnnnnnnnnnnnnnnnnnnnnnnnnnnnnnnnnnnnnnnnnnnnnnnnnnnnnnnnnnnnnnnnnnnnnnnnnnnnnnnnnnnnnnnnnnnnnnnnnnnnnnnnnnnnnnnnnnnnnnnnnnnnnnnnnnnnnnnnnnnnnnnnnnnnnnnnnnnnnnnnnnnnnnnnnnnnnnnnnnnnnnnnnnnnnnnnnnnnnnnnnnnnnnnnnnnnnnnnnnnnnnnnnnnnnnnnnnnnnnnnnnnnnnnnnnnnnnnnnnnnnnnnnnnnnnnnnnnnnnnnnnnnnnnnnnnnnnnnnnnnnnnnnnnnnnnnnnnnnnnnnnnnnnnnnnnnnnnnnnnnnnnnnnnnnnnnnnnnnnnnnnnnnnnnnnnnnnnnnnnnnnnnnnnnnnnnnnnnnnnnnnnnnnnnnnnnnnnnnnnnnnnnnnnnnnnnnnnnnnnnnnnnnnnnnnnnnnnnnnnnnnnnnnnnnnnnnnnnnnnnnnnnnnnnnnnnnnnnnnnnnnnnnnnnnnnnnnnnnnnnnnnnnnnnnnnnnnnnnnnnnnnnnnnnnnnnnnnnnnnnnnnnnnnnnnnnnnnnnnnnnnnnnnnnnnnnnnnnnnnnnnnnnnnnnnnnnnnnnnnnnnnnnnnnnnnnnnnnnnnnnnnnnnnnnnnnnnnnnnnnnnnnnnnnnnnnnnnnnnnnnnnnnnnnnnnnnnnnnnnnnnnnnnnnnnnnnnnnnnnnnnnnnnnnnnnnnnnnnnnnnnnnnnnnnnnnnnnnnnnnnnnnnnnnnnnnnnnnnnnnnnnnnnnnnnnnnnnnnnnnnnnnnnnnnnnnnnnnnnnnnnnnnnnnnnnnnnnnnnnnnnnnnnnnnnnnnnnnnnnnnnnnnnnnnnnnnnnnnnnnnnnnnnnnnnnnnnnnnnnnnnnnnnnnnnnnnnnnnnnnnnnnnnnnnnnnnnnnnnnnnnnnnnnnnnnnnnnnnnnnnnnnnnnnnnnnnnnnnnnnnnnnnnnnnnnnnnnnnnnnnnnnnnnnnnnnnnnnnnnnnnnnnnnnnnnnnnnnnnnnnnnnnnnnnnnnnnnnnnnnnnnnnnnnnnnnnnnnnnnnnnnnnnnnnnnnnnnnnnnnnnnnnnnnnnnnnnnnnnnnnnnnnnnnnnnnnnnnnnnnnnnnnnnnnnnnnnnnnnnnnnnnnnnnnnnnnnnnnnnnnnnnnnnnnnnnnnnnnnnnnnnnnnnnnnnnnnnnnnnnnnnnnnnnnnnnnnnnnnnnnnnnnnnnnnnnnnnnnnnnnnnnnnnnnnnnnnnnnnnnnnnnnnnnnnnnnnnnnnnnnnnnnnnnnnnnnnnnnnnnnnnnnnnnnnnnnnnnnnnnnnnnnnnnnnnnnnnnnnnnnnnnnnnnnnnnnnnnnnnnnnnnnnnnnnnnnnnnnnnnnnnnnnnnnnnnnnnnnnnnnnnnnnnnnnnnnnnnnnnnnnnnnnnnnnnnnnnnnnnnnnnnnnnnnnnnnnnnnnnnnnnnnnnnnnnnnnnnnnnnnnnnnnnnnnnnnnnnnnnnnnnnnnnnnnnnnnnnnnnnnnnnnnnnnnnnnnnnnnnnnnnnnnnnnnnnnnnnnnnnnnnnnnnnnnnnnnnnnnnnnnnnnnnnnnnnnnnnnnnnnnnnnnnnnnnnnnnnnnnnnnnnnnnnnnnnnnnnnnnnnnnnnnnnnnnnnnnnnnnnnnnnnnnnnnnnnnnnnnnnnnnnnnnnnnnnnnnnnnnnnnnnnnnnnnnnnnnnnnnnnnnnnnnnnnnnnnnnnnnnnnnnnnnnnnnnnnnnnnnnnnnnnnnnnnnnnnnnnnnnnnnnnnnnnnnnnnnnnnnnnnnnnnnnnnnnnnnnnnnnnnnnnnnnnnnnnnnnnnnnnnnnnnnnnnnnnnnnnnnnnnnnnnnnnnnnnnnnnnnnnnnnnnnnnnnnnnnnnnnnnnnnnnnnnnnnnnnnnnnnnnnnnnnnnnnnnnnnnnnnnnnnnnnnnnnnnnnnnnnnnnnnnnnnnnnnnnnnnnnnnnnnnnnnnnnnnnnnnnnnnnnnnnnnnnnnnnnnnnnnnnnnnnnnnnnnnnnnnnnnnnnnnnnnnnnnnnnnnnnnnnnnnnnnnnnnnnnnnnnnnnnnnnnnnnnnnnnnnnnnnnnnnnnnnnnnnnnnnnnnnnnnnnnnnnnnnnnnnnnnnnnnnnnnnnnnnnnnnnnnnnnnnnnnnnnnnnnnnnnnnnnnnnnnnnnnnnnnnnnnnnnnnnnnnnnnnnnnnnnnnnnnnnnnnnnnnnnnnnnnnnnnnnnnnnnnnnnnnnnnnnnnnnnnnnnnnnnnnnnnnnnnnnnnnnnnnnnnnnnnnnnnnnnnnnnnnnnnnnnnnnnnnnnnnnnnnnnnnnnnnnnnnnnnnnnnnnnnnnnnnnnnnnnnnnnnnnnnnnnnnnnnnnnnnnnnnnnnnnnnnnnnnnnnnnnnnnnnnnnnnnnnnnnnnnnnnnnnnnnnnnnnnnnnnnnnnnnnnnnnnnnnnnnnnnnnnnnnnnnnnnnnnnnnnnnnnnnnnnnnnnnnnnnnnnnnnnnnnnnnnnnnnnnnnnnnnnnnnnnnnnnnnnnnnnnnnnnnnnnnnnnnnnnnnnnnnnnnnnnnnnnnnnnnnnnnnnnnnnnnnnnnnnnnnnnnnnnnnnnnnnnnnnnnnnnnnnnnnnnnnnnnnnnnnnnnnnnnnnnnnnnnnnnnnnnnnnnnnnnnnnnnnnnnnnnnnnnnnnnnnnnnnnnnnnnnnnnnnnnnnnnnnnnnnnnnnnnnnnnnnnnnnnnnnnnnnnnnnnnnnnnnnnnnnnnnnnnnnnnnnnnnnnnnnnnnnnnnnnnnnnnnnnnnnnnnnnnnnnnnnnnnnnnnnnnnnnnnnnnnnnnnnnnnnnnnnnnnnnnnnnnnnnnnnnnnnnnnnnnnnnnnnnnnnnnnnnnnnnnnnnnnnnnnnnnnnnnnnnnnnnnnnnnnnnnnnnnnnnnnnnnnnnnnnnnnnnnnnnnnnnnnnnnnnnnnnnnnnnnnnnnnnnnnnnnnnnnnnnnnnnnnnnnnnnnnnnnnnnnnnnnnnnnnnnnnnnnnnnnnnnnnnnnnnnnnnnnnnnnnnnnnnnnnnnnnnnnnnnnnnnnnnnnnnnnnnnnnnnnnnnnnnnnnnnnnnnnnnnnnnnnnnnnnnnnnnnnnnnnnnnnnnnnnnnnnnnnnnnnnnnnnnnnnnnnnnnnnnnnnnnnnnnnnnnnnnnnnnnnnnnnnnnnnnnnnnnnnnnnnnnnnnnnnnnnnnnnnnnnnnnnnnnnnnnnnnnnnnnnnnnnnnnnnnnnnnnnnnnnnnnnnnnnnnnnnnnnnnnnnnnnnnnnnnnnnnnnnnnnnnnnnnnnnnnnnnnnnnnnnnnnnnnnnnnnnnnnnnnnnnnnnnnnnnnnnnnnnnnnnnnnnnnnnnnnnnnnnnnnnnnnnnnnnnnnnnnnnnnnnnnnnnnnnnnnnnnnnnnnnnnnnnnnnnnnnnnnnnnnnnnnnnnnnnnnnnnnnnnnnnnnnnnnnnnnnnnnnnnnnnnnnnnnnnnnnnnnnnnnnnnnnnnnnnnnnnnnnnnnnnnnnnnnnnnnnnnnnnnnnnnnnnnnnnnnnnnnnnnnnnnnnnnnnnnnnnnnnnnnnnnnnnnnnnnnnnnnnnnnnnnnnnnnnnnnnnnnnnnnnnnnnnnnnnnnnnnnnnnnnnnnnnnnnnnnnnnnnnnnnnnnnnnnnnnnnnnnnnnnnnnnnnnnnnnnnnnnnnnnnnnnnnnnnnnnnnnnnnnnnnnnnnnnnnnnnnnnnnnnnnnnnnnnnnnnnnnnnnnnnnnnnnnnnnnnnnnnnnnnnnnnnnnnnnnnnnnnnnnnnnnnnnnnnnnnnnnnnnnnnnnnnnnnnnnnnnnnnnnnnnnnnnnnnnnnnnnnnnnnnnnnnnnnnnnnnnnnnnnnnnnnnnnnnnnnnnnnnnnnnnnnnnnnnnnnnnnnnnnnnnnnnnnnnnnnnnnnnnnnnnnnnnnnnnnnnnnnnnnnnnnnnnnnnnnnnnnnnnnnnnnnnnnnnnnnnnnnnnnnnnnnnnnnnnnnnnnnnnnnnnnnnnnnnnnnnnnnnnnnnnnnnnnnnnnnnnnnnnnnnnnnnnnnnnnnnnnnnnnnnnnnnnnnnnnnnnnnnnnnnnnnnnnnnnnnnnnnnnnnnnnnnnnnnnnnnnnnnnnnnnnnnnnnnnnnnnnnnnnnnnnnnnnnnnnnnnnnnnnnnnnnnnnnnnnnnnnnnnnnnnnnnnnnnnnnnnnnnnnnnnnnnnnnnnnnnnnnnnnnnnnnnnnnnnnnnnnnnnnnnnnnnnnnnnnnnnnnnnnnnnnnnnnnnnnnnnnnnnnnnnnnnnnnnnnnnnnnnnnnnnnnnnnnnnnnnnnnnnnnnnnnnnnnnnnnnnnnnnnnnnnnnnnnnnnnnnnnnnnnnnnnnnnnnnnnnnnnnnnnnnnnnnnnnnnnnnnnnnnnnnnnnnnnnnnnnnnnnnnnnnnnnnnnnnnnnnnnnnnnnnnnnnnnnnnnnnnnnnnnnnnnnnnnnnnnnnnnnnnnnnnnnnnnnnnnnnnnnnnnnnnnnnnnnnnnnnnnnnnnnnnnnnnnnnnnnnnnnnnnnnnnnnnnnnnnnnnnnnnnnnnnnnnnnnnnnnnnnnnnnnnnnnnnnnnnnnnnnnnnnnnnnnnnnnnnnnnnnnnnnnnnnnnnnnnnnnnnnnnnnnnnnnnnnnnnnnnnnnnnnnnnnnnnnnnnnnnnnnnnnnnnnnnnnnnnnnnnnnnnnnnnnnnnnnnnnnnnnnnnnnnnnnnnnnnnnnnnnnnnnnnnnnnnnnnnnnnnnnnnnnnnnnnnnnnnnnnnnnnnnnnnnnnnnnnnnnnnnnnnnnnnnnnnnnnnnnnnnnnnnnnnnnnnnnnnnnnnnnnnnnnnnnnnnnnnnnnnnnnnnnnnnnnnnnnnnnnnnnnnnnnnnnnnnnnnnnnnnnnnnnnnnnnnnnnnnnnnnnnnnnnnnnnnnnnnnnnnnnnnnnnnnnnnnnnnnnnnnnnnnnnnnnnnnnnnnnnnnnnnnnnnnnnnnnnnnnnnnnnnnnnnnnnnnnnnnnnnnnnnnnnnnnnnnnnnnnnnnnnnnnnnnnnnnnnnnnnnnnnnnnnnnnnnnnnnnnnnnnnnnnnnnnnnnnnnnnnnnnnnnnnnnnnnnnnnnnnnnnnnnnnnnnnnnnnnnnnnnnnnnnnnnnnnnnnnnnnnnnnnnnnnnnnnnnnnnnnnnnnnnnnnnnnnnnnnnnnnnnnnnnnnnnnnnnnnnnnnnnnnnnnnnnnnnnnnnnnnnnnnnnnnnnnnnnnnnnnnnnnnnnnnnnnnnnnnnnnnnnnnnnnnnnnnnnnnnnnnnnnnnnnnnnnnnnnnnnnnnnnnnnnnnnnnnnnnnnnnnnnnnnnnnnnnnnnnnnnnnnnnnnnnnnnnnnnnnnnnnnnnnnnnnnnnnnnnnnnnnnnnnnnnnnnnnnnnnnnnnnnnnnnnnnnnnnnnnnnnnnnnnnnnnnnnnnnnnnnnnnnnnnnnnnnnnnnnnnnnnnnnnnnnnnnnnnnnnnnnnnnnnnnnnnnnnnnnnnnnnnnnnnnnnnnnnnnnnnnnnnnnnnnnnnnnnnnnnnnnnnnnnnnnnnnnnnnnnnnnnnnnnnnnnnnnnnnnnnnnnnnnnnnnnnnnnnnnnnnnnnnnnnnnnnnnnnnnnnnnnnnnnnnnnnnnnnnnnnnnnnnnnnnnnnnnnnnnnnnnnnnnnnnnnnnnnnnnnnnnnnnnnnnnnnnnnnnnnnnnnnnnnnnnnnnnnnnnnnnnnnnnnnnnnnnnnnnnnnnnnnnnnnnnnnnnnnnnnnnnnnnnnnnnnnnnnnnnnnnnnnnnnnnnnnnnnnnnnnnnnnnnnnnnnnnnnnnnnnnnnnnnnnnnnnnnnnnnnnnnnnnnnnnnnnnnnnnnnnnnnnnnnnnnnnnnnnnnnnnnnnnnnnnnnnnnnnnnnnnnnnnnnnnnnnnnnnnnnnnnnnnnnnnnnnnnnnnnnnnnnnnnnnnnnnnnnnnnnnnnnnnnnnnnnnnnnnnnnnnnnnnnnnnnnnnnnnnnnnnnnnnnnnnnnnnnnnnnnnnnnnnnnnnnnnnnnnnnnnnnnnnnnnnnnnnnnnnnnnnnnnnnnnnnnnnnnnnnnnnnnnnnnnnnnnnnnnnnnnnnnnnnnnnnnnnnnnnnnnnnnnnnnnnnnnnnnnnnnnnnnnnnnnnnnnnnnnnnnnnnnnnnnnnnnnnnnnnnnnnnnnnnnnnnnnnnnnnnnnnnnnnnnnnnnnnnnnnnnnnnnnnnnnnnnnnnnnnnnnnnnnnnnnnnnnnnnnnnnnnnnnnnnnnnnnnnnnnnnnnnnnnnnnnnnnnnnnnnnnnnnnnnnnnnnnnnnnnnnnnnnnnnnnnnnnnnnnnnnnnnnnnnnnnnnnnnnnnnnnnnnnnnnnnnnnnnnnnnnnnnnnnnnnnnnnnnnnnnnnnnnnnnnnnnnnnnnnnnnnnnnnnnnnnnnnnnnnnnnnnnnnnnnnnnnnnnnnnnnnnnnnnnnnnnnnnnnnnnnnnnnnnnnnnnnnnnnnnnnnnnnnnnnnnnnnnnnnnnnnnnnnnnnnnnnnnnnnnnnnnnnnnnnnnnnnnnnnnnnnnnnnnnnnnnnnnnnnnnnnnnnnnnnnnnnnnnnnnnnnnnnnnnnnnnnnnnnnnnnnnnnnnnnnnnnnnnnnnnnnnnnnnnnnnnnnnnnnnnnnnnnnnnnnnnnnnnnnnnnnnnnnnnnnnnnnnnnnnnnnnnnnnnnnnnnnnnnnnnnnnnnnnnnnnnnnnnnnnnnnnnnnnnnnnnnnnnnnnnnnnnnnnnnnnnnnnnnnnnnnnnnnnnnnnnnnnnnnnnnnnnnnnnnnnnnnnnnnnnnnnnnnnnnnnnnnnnnnnnnnnnnnnnnnnnnnnnnnnnnnnnnnnnnnnnnnnnnnnnnnnnnnnnnnnnnnnnnnnnnnnnnnnnnnnnnnnnnnnnnnnnnnnnnnnnnnnnnnnnnnnnnnnnnnnnnnnnnnnnnnnnnnnnnnnnnnnnnnnnnnnnnnnnnnnnnnnnnnnnnnnnnnnnnnnnnnnnnnnnnnnnnnnnnnnnnnnnnnnnnnnnnnnnnnnnnnnnnnnnnnnnnnnnnnnnnnnnnnnnnnnnnnnnnnnnnnnnnnnnnnnnnnnnnnnnnnnnnnnnnnnnnnnnnnnnnnnnnnnnnnnnnnnnnnnnnnnnnnnnnnnnnnnnnnnnnnnnnnnnnnnnnnnnnnnnnnnnnnnnnnnnnnnnnnnnnnnnnnnnnnnnnnnnnnnnnnnnnnnnnnnnnnnnnnnnnnnnnnnnnnnnnnnnnnnnnnnnnnnnnnnnnnnnnnnnnnnnnnnnnnnnnnnnnnnnnnnnnnnnnnnnnnnnnnnnnnnnnnnnnnnnnnnnnnnnnnnnnnnnnnnnnnnnnnnnnnnnnnnnnnnnnnnnnnnnnnnnnnnnnnnnnnnnnnnnnnnnnnnnnnnnnnnnnnnnnnnnnnnnnnnnnnnnnnnnnnnnnnnnnnnnnnnnnnnnnnnnnnnnnnnnnnnnnnnnnnnnnnnnnnnnnnnnnnnnnnnnnnnnnnnnnnnnnnnnnnnnnnnnnnnnnnnnnnnnnnnnnnnnnnnnnnnnnnnnnnnnnnnnnnnnnnnnnnnnnnnnnnnnnnnnnnnnnnnnnnnnnnnnnnnnnnnnnnnnnnnnnnnnnnnnnnnnnnnnnnnnnnnnnnnnnnnnnnnnnnnnnnnnnnnnnnnnnnnnnnnnnnnnnnnnnnnnnnnnnnnnnnnnnnnnnnnnnnnnnnnnnnnnnnnnnnnnnnnnnnnnnnnnnnnnnnnnnnnnnnnnnnnnnnnnnnnnnnnnnnnnnnnnnnnnnnnnnnnnnnnnnnnnnnnnnnnnnnnnnnnnnnnnnnnnnnnnnnnnnnnnnnnnnnnnnnnnnnnnnnnnnnnnnnnnnnnnnnnnnnnnnnnnnnnnnnnnnnnnnnnnnnnnnnnnnnnnnnnnnnnnnnnnnnnnnnnnnnnnnnnnnnnnnnnnnnnnnnnnnnnnnnnnnnnnnnnnnnnnnnnnnnnnnnnnnnnnnnnnnnnnnnnnnnnnnnnnnnnnnnnnnnnnnnnnnnnnnnnnnnnnnnnnnnnnnnnnnnnnnnnnnnnnnnnnnnnnnnnnnnnnnnnnnnnnnnnnnnnnnnnnnnnnnnnnnnnnnnnnnnnnnnnnnnnnnnnnnnnnnnnnnnnnnnnnnnnnnnnnnnnnnnnnnnnnnnnnnnnnnnnnnnnnnnnnnnnnnnnnnnnnnnnnnnnnnnnnnnnnnnnnnnnnnnnnnnnnnnnnnnnnnnnnnnnnnnnnnnnnnnnnnnnnnnnnnnnnnnnnnnnnnnnnnnnnnnnnnnnnnnnnnnnnnnnnnnnnnnnnnnnnnnnnnnnnnnnnnnnnnnnnnnnnnnnnnnnnnnnnnnnnnnnnnnnnnnnnnnnnnnnnnnnnnnnnnnnnnnnnnnnnnnnnnnnnnnnnnnnnnnnnnnnnnnnnnnnnnnnnnnnnnnnnnnnnnnnnnnnnnnnnnnnnnnnnnnnnnnnnnnnnnnnnnnnnnnnnnnnnnnnnnnnnnnnnnnnnnnnnnnnnnnnnnnnnnnnnnnnnnnnnnnnnnnnnnnnnnnnnnnnnnnnnnnnnnnnnnnnnnnnnnnnnnnnnnnnnnnnnnnnnnnnnnnnnnnnnnnnnnnnnnnnnnnnnnnnnnnnnnnnnnnnnnnnnnnnnnnnnnnnnnnnnnnnnnnnnnnnnnnnnnnnnnnnnnnnnnnnnnnnnnnnnnnnnnnnnnnnnnnnnnnnnnnnnnnnnnnnnnnnnnnnnnnnnnnnnnnnnnnnnnnnnnnnnnnnnnnnnnnnnnnnnnnnnnnnnnnnnnnnnnnnnnnnnnnnnnnnnnnnnnnnnnnnnnnnnnnnnnnnnnnnnnnnnnnnnnnnnnnnnnnnnnnnnnnnnnnnnnnnnnnnnnnnnnnnnnnnnnnnnnnnnnnnnnnnnnnnnnnnnnnnnnnnnnnnnnnnnnnnnnnnnnnnnnnnnnnnnnnnnnnnnnnnnnnnnnnnnnnnnnnnnnnnnnnnnnnnnnnnnnnnnnnnnnnnnnnnnnnnnnnnnnnnnnnnnnnnnnnnnnnnnnnnnnnnnnnnnnnnnnnnnnnnnnnnnnnnnnnnnnnnnnnnnnnnnnnnnnnnnnnnnnnnnnnnnnnnnnnnnnnnnnnnnnnnnnnnnnnnnnnnnnnnnnnnnnnnnnnnnnnnnnnnnnnnnnnnnnnnnnnnnnnnnnnnnnnnnnnnnnnnnnnnnnnnnnnnnnnnnnnnnnnnnnnnnnnnnnnnnnnnnnnnnnnnnnnnnnnnnnnnnnnnnnnnnnnnnnnnnnnnnnnnnnnnnnnnnnnnnnnnnnnnnnnnnnnnnnnnnnnnnnnnnnnnnnnnnnnnnnnnnnnnnnnnnnnnnnnnnnnnnnnnnnnnnnnnnnnnnnnnnnnnnnnnnnnnnnnnnnnnnnnnnnnnnnnnnnnnnnnnnnnnnnnnnnnnnnnnnnnnnnnnnnnnnnnnnnnnnnnnnnnnnnnnnnnnnnnnnnnnnnnnnnnnnnnnnnnnnnnnnnnnnnnnnnnnnnnnnnnnnnnnnnnnnnnnnnnnnnnnnnnnnnnnnnnnnnnnnnnnnnnnnnnnnnnnnnnnnnnnnnnnnnnnnnnnnnnnnnnnnnnnnnnnnnnnnnnnnnnnnnnnnnnnnnnnnnnnnnnnnnnnnnnnnnnnnnnnnnnnnnnnnnnnnnnnnnnnnnnnnnnnnnnnnnnnnnnnnnnnnnnnnnnnnnnnnnnnnnnnnnnnnnnnnnnnnnnnnnnnnnnnnnnnnnnnnnnnnnnnnnnnnnnnnnnnnnnnnnnnnnnnnnnnnnnnnnnnnnnnnnnnnnnnnnnnnnnnnnnnnnnnnnnnnnnnnnnnnnnnnnnnnnnnnnnnnnnnnnnnnnnnnnnnnnnnnnnnnnnnnnnnnnnnnnnnnnnnnnnnnnnnnnnnnnnnnnnnnnnnnnnnnnnnnnnnnnnnnnnnnnnnnnnnnnnnnnnnnnnnnnnnnnnnnnnnnnnnnnnnnnnnnnnnnnnnnnnnnnnnnnnnnnnnnnnnnnnnnnnnnnnnnnnnnnnnnnnnnnnnnnnnnnnnnnnnnnnnnnnnnnnnnnnnnnnnnnnnnnnnnnnnnnnnnnnnnnnnnnnnnnnnnnnnnnnnnnnnnnnnnnnnnnnnnnnnnnnnnnnnnnnnnnnnnnnnnnnnnnnnnnnnnnnnnnnnnnnnnnnnnnnnnnnnnnnnnnnnnnnnnnnnnnnnnnnnnnnnnnnnnnnnnnnnnnnnnnnnnnnnnnnnnnnnnnnnnnnnnnnnnnnnnnnnnnnnnnnnnnnnnnnnnnnnnnnnnnnnnnnnnnnnnnnnnnnnnnnnnnnnnnnnnnnnnnnnnnnnnnnnnnnnnnnnnnnnnnnnnnnnnnnnnnnnnnnnnnnnnnnnnnnnnnnnnnnnnnnnnnnnnnnnnnnnnnnnnnnnnnnnnnnnnnnnnnnnnnnnnnnnnnnnnnnnnnnnnnnnnnnnnnnnnnnnnnnnnnnnnnnnnnnnnnnnnnnnnnnnnnnnnnnnnnnnnnnnnnnnnnnnnnnnnnnnnnnnnnnnnnnnnnnnnnnnnnnnnnnnnnnnnnnnnnnnnnnnnnnnnnnnnnnnnnnnnnnnnnnnnnnnnnnnnnnnnnnnnnnnnnnnnnnnnnnnnnnnnnnnnnnnnnnnnnnnnnnnnnnnnnnnnnnnnnnnnnnnnnnnnnnnnnnnnnnnnnnnnnnnnnnnnnnnnnnnnnnnnnnnnnnnnnnnnnnnnnnnnnnnnnnnnnnnnnnnnnnnnnnnnnnnnnnnnnnnnnnnnnnnnnnnnnnnnnnnnnnnnnnnnnnnnnnnnnnnnnnnnnnnnnnnnnnnnnnnnnnnnnnnnnnnnnnnnnnnnnnnnnnnnnnnnnnnnnnnnnnnnnnnnnnnnnnnnnnnnnnnnnnnnnnnnnnnnnnnnnnnnnnnnnnnnnnnnnnnnnnnnnnnnnnnnnnnnnnnnnnnnnnnnnnnnnnnnnnnnnnnnnnnnnnnnnnnnnnnnnnnnnnnnnnnnnnnnnnnnnnnnnnnnnnnnnnnnnnnnnnnnnnnnnnnnnnnnnnnnnnnnnnnnnnnnnnnnnnnnnnnnnnnnnnnnnnnnnnnnnnnnnnnnnnnnnnnnnnnnnnnnnnnnnnnnnnnnnnnnnnnnnnnnnnnnnnnnnnnnnnnnnnnnnnnnnnnnnnnnnnnnnnnnnnnnnnnnnnnnnnnnnnnnnnnnnnnnnnnnnnnnnnnnnnnnnnnnnnnnnnnnnnnnnnnnnnnnnnnnnnnnnnnnnnnnnnnnnnnnnnnnnnnnnnnnnnnnnnnnnnnnnnnnnnnnnnnnnnnnnnnnnnnnnnnnnnnnnnnnnnnnnnnnnnnnnnnnnnnnnnnnnnnnnnnnnnnnnnnnnnnnnnnnnnnnnnnnnnnnnnnnnnnnnnnnnnnnnnnnnnnnnnnnnnnnnnnnnnnnnnnnnnnnnnnnnnnnnnnnnnnnnnnnnnnnnnnnnnnnnnnnnnnnnnnnnnnnnnnnnnnnnnnnnnnnnnnnnnnnnnnnnnnnnnnnnnnnnnnnnnnnnnnnnnnnnnnnnnnnnnnnnnnnnnnnnnnnnnnnnnnnnnnnnnnnnnnnnnnnnnnnnnnnnnnnnnnnnnnnnnnnnnnnnnnnnnnnnnnnnnnnnnnnnnnnnnnnnnnnnnnnnnnnnnnnnnnnnnnnnnnnnnnnnnnnnnnnnnnnnnnnnnnnnnnnnnnnnnnnnnnnnnnnnnnnnnnnnnnnnnnnnnnnnnnnnnnnnnnnnnnnnnnnnnnnnnnnnnnnnnnnnnnnnnnnnnnnnnnnnnnnnnnnnnnnnnnnnnnnnnnnnnnnnnnnnnnnnnnnnnnnnnnnnnnnnnnnnnnnnnnnnnnnnnnnnnnnnnnnnnnnnnnnnnnnnnnnnnnnnnnnnnnnnnnnnnnnnnnnnnnnnnnnnnnnnnnnnnnnnnnnnnnnnnnnnnnnnnnnnnnnnnnnnnnnnnnnnnnnnnnnnnnnnnnnnnnnnnnnnnnnnnnnnnnnnnnnnnnnnnnnnnnnnnnnnnnnnnnnnnnnnnnnnnnnnnnnnnnnnnnnnnnnnnnnnnnnnnnnnnnnnnnnnnnnnnnnnnnnnnnnnnnnnnnnnnnnnnnnnnnnnnnnnnnnnnnnnnnnnnnnnnnnnnnnnnnnnnnnnnnnnnnnnnnnnnnnnnnnnnnnnnnnnnnnnnnnnnnnnnnnnnnnnnnnnnnnnnnnnnnnnnnnnnnnnnnnnnnnnnnnnnnnnnnnnnnnnnnnnnnnnnnnnnnnnnnnnnnnnnnnnnnnnnnnnnnnnnnnnnnnnnnnnnnnnnnnnnnnnnnnnnnnnnnnnnnnnnnnnnnnnnnnnnnnnnnnnnnnnnnnnnnnnnnnnnnnnnnnnnnnnnnnnnnnnnnnnnnnnnnnnnnnnnnnnnnnnnnnnnnnnnnnnnnnnnnnnnnnnnnnnnnnnnnnnnnnnnnnnnnnnnnnnnnnnnnnnnnnnnnnnnnnnnnnnnnnnnnnnnnnnnnnnnnnnnnnnnnnnnnnnnnnnnnnnnnnnnnnnnnnnnnnnnnnnnnnnnnnnnnnnnnnnnnnnnnnnnnnnnnnnnnnnnnnnnnnnnnnnnnnnnnnnnnnnnnnnnnnnnnnnnnnnnnnnnnnnnnnnnnnnnnnnnnnnnnnnnnnnnnnnnnnnnnnnnnnnnnnnnnnnnnnnnnnnnnnnnnnnnnnnnnnnnnnnnnnnnnnnnnnnnnnnnnnnnnnnnnnnnnnnnnnnnnnnnnnnnnnnnnnnnnnnnnnnnnnnnnnnnnnnnnnnnnnnnnnnnnnnnnnnnnnnnnnnnnnnnnnnnnnnnnnnnnnnnnnnnnnnnnnnnnnnnnnnnnnnnnnnnnnnnnnnnnnnnnnnnnnnnnnnnnnnnnnnnnnnnnnnnnnnnnnnnnnnnnnnnnnnnnnnnnnnnnnnnnnnnnnnnnnnnnnnnnnnnnnnnnnnnnnnnnnnnnnnnnnnnnnnnnnnnnnnnnnnnnnnnnnnnnnnnnnnnnnnnnnnnnnnnnnnnnnnnnnnnnnnnnnnnnnnnnnnnnnnnnnnnnnnnnnnnnnnnnnnnnnnnnnnnnnnnnnnnnnnnnnnnnnnnnnnnnnnnnnnnnnnnnnnnnnnnnnnnnnnnnnnnnnnnnnnnnnnnnnnnnnnnnnnnnnnnnnnnnnnnnnnnnnnnnnnnnnnnnnnnnnnnnnnnnnnnnnnnnnnnnnnnnnnnnnnnnnnnnnnnnnnnnnnnnnnnnnnnnnnnnnnnnnnnnnnnnnnnnnnnnnnnnnnnnnnnnnnnnnnnnnnnnnnnnnnnnnnnnnnnnnnnnnnnnnnnnnnnnnnnnnnnnnnnnnnnnnnnnnnnnnnnnnnnnnnnnnnnnnnnnnnnnnnnnnnnnnnnnnnnnnnnnnnnnnnnnnnnnnnnnnnnnnnnnnnnnnnnnnnnnnnnnnnnnnnnnnnnnnnnnnnnnnnnnnnnnnnnnnnnnnnnnnnnnnnnnnnnnnnnnnnnnnnnnnnnnnnnnnnnnnnnnnnnnnnnnnnnnnnnnnnnnnnnnnnnnnnnnnnnnnnnnnnnnnnnnnnnnnnnnnnnnnnnnnnnnnnnnnnnnnnnnnnnnnnnnnnnnnnnnnnnnnnnnnnnnnnnnnnnnnnnnnnnnnnnnnnnnnnnnnnnnnnnnnnnnnnnnnnnnnnnnnnnnnnnnnnnnnnnnnnnnnnnnnnnnnnnnnnnnnnnnnnnnnnnnnnnnnnnnnnnnnnnnnnnnnnnnnnnnnnnnnnnnnnnnnnnnnnnnnnnnnnnnnnnnnnnnnnnnnnnnnnnnnnnnnnnnnnnnnnnnnnnnnnnnnnnnnnnnnnnnnnnnnnnnnnnnnnnnnnnnnnnnnnnnnnnnnnnnnnnnnnnnnnnnnnnnnnnnnnnnnnnnnnnnnnnnnnnnnnnnnnnnnnnnnnnnnnnnnnnnnnnnnnnnnnnnnnnnnnnnnnnnnnnnnnnnnnnnnnnnnnnnnnnnnnnnnnnnnnnnnnnnnnnnnnnnnnnnnnnnnnnnnnnnnnnnnnnnnnnnnnnnnnnnnnnnnnnnnnnnnnnnnnnnnnnnnnnnnnnnnnnnnnnnnnnnnnnnnnnnnnnnnnnnnnnnnnnnnnnnnnnnnnnnnnnnnnnnnnnnnnnnnnnnnnnnnnnnnnnnnnnnnnnnnnnnnnnnnnnnnnnnnnnnnnnnnnnnnnnnnnnnnnnnnnnnnnnnnnnnnnnnnnnnnnnnnnnnnnnnnnnnnnnnnnnnnnnnnnnnnnnnnnnnnnnnnnnnnnnnnnnnnnnnnnnnnnnnnnnnnnnnnnnnnnnnnnnnnnnnnnnnnnnnnnnnnnnnnnnnnnnnnnnnnnnnnnnnnnnnnnnnnnnnnnnnnnnnnnnnnnnnnnnnnnnnnnnnnnnnnnnnnnnnnnnnnnnnnnnnnnnnnnnnnnnnnnnnnnnnnnnnnnnnnnnnnnnnnnnnnnnnnnnnnnnnnnnnnnnnnnnnnnnnnnnnnnnnnnnnnnnnnnnnnnnnnnnnnnnnnnnnnnnnnnnnnnnnnnnnnnnnnnnnnnnnnnnnnnnnnnnnnnnnnnnnnnnnnnnnnnnnnnnnnnnnnnnnnnnnnnnnnnnnnnnnnnnnnnnnnnnnnnnnnnnnnnnnnnnnnnnnnnnnnnnnnnnnnnnnnnnnnnnnnnnnnnnnnnnnnnnnnnnnnnnnnnnnnnnnnnnnnnnnnnnnnnnnnnnnnnnnnnnnnnnnnnnnnnnnnnnnnnnnnnnnnnnnnnnnnnnnnnnnnnnnnnnnnnnnnnnnnnnnnnnnnnnnnnnnnnnnnnnnnnnnnnnnnnnnnnnnnnnnnnnnnnnnnnnnnnnnnnnnnnnnnnnnnnnnnnnnnnnnnnnnnnnnnnnnnnnnnnnnnnnnnnnnnnnnnnnnnnnnnnnnnnnnnnnnnnnnnnnnnnnnnnnnnnnnnnnnnnnnnnnnnnnnnnnnnnnnnnnnnnnnnnnnnnnnnnnnnnnnnnnnnnnnnnnnnnnnnnnnnnnnnnnnnnnnnnnnnnnnnnnnnnnnnnnnnnnnnnnnnnnnnnnnnnnnnnnnnnnnnnnnnnnnnnnnnnnnnnnnnnnnnnnnnnnnnnnnnnnnnnnnnnnnnnnnnnnnnnnnnnnnnnnnnnnnnnnnnnnnnnnnnnnnnnnnnnnnnnnnnnnnnnnnnnnnnnnnnnnnnnnnnnnnnnnnnnnnnnnnnnnnnnnnnnnnnnnnnnnnnnnnnnnnnnnnnnnnnnnnnnnnnnnnnnnnnnnnnnnnnnnnnnnnnnnnnnnnnnnnnnnnnnnnnnnnnnnnnnnnnnnnnnnnnnnnnnnnnnnnnnnnnnnnnnnnnnnnnnnnnnnnnnnnnnnnnnnnnnnnnnnnnnnnnnnnnnnnnnnnnnnnnnnnnnnnnnnnnnnnnnnnnnnnnnnnnnnnnnnnnnnnnnnnnnnnnnnnnnnnnnnnnnnnnnnnnnnnnnnnnnnnnnnnnnnnnnnnnnnnnnnnnnnnnnnnnnnnnnnnnnnnnnnnnnnnnnnnnnnnnnnnnnnnnnnnnnnnnnnnnnnnnnnnnnnnnnnnnnnnnnnnnnnnnnnnnnnnnnnnnnnnnnnnnnnnnnnnnnnnnnnnnnnnnnnnnnnnnnnnnnnnnnnnnnnnnnnnnnnnnnnnnnnnnnnnnnnnnnnnnnnnnnnnnnnnnnnnnnnnnnnnnnnnnnnnnnnnnnnnnnnnnnnnnnnnnnnnnnnnnnnnnnnnnnnnnnnnnnnnnnnnnnnnnnnnnnnnnnnnnnnnnnnnnnnnnnnnnnnnnnnnnnnnnnnnnnnnnnnnnnnnnnnnnnnnnnnnnnnnnnnnnnnnnnnnnnnnnnnnnnnnnnnnnnnnnnnnnnnnnnnnnnnnnnnnnnnnnnnnnnnnnnnnnnnnnnnnnnnnnnnnnnnnnnnnnnnnnnnnnnnnnnnnnnnnnnnnnnnnnnnnnnnnnnnnnnnnnnnnnnnnnnnnnnnnnnnnnnnnnnnnnnnnnnnnnnnnnnnnnnnnnnnnnnnnnnnnnnnnnnnnnnnnnnnnnnnnnnnnnnnnnnnnnnnnnnnnnnnnnnnnnnnnnnnnnnnnnnnnnnnnnnnnnnnnnnnnnnnnnnnnnnnnnnnnnnnnnnnnnnnnnnnnnnnnnnnnnnnnnnnnnnnnnnnnnnnnnnnnnnnnnnnnnnnnnnnnnnnnnnnnnnnnnnnnnnnnnnnnnnnnnnnnnnnnnnnnnnnnnnnnnnnnnnnnnnnnnnnnnnnnnnnnnnnnnnnnnnnnnnnnnnnnnnnnnnnnnnnnnnnnnnnnnnnnnnnnnnnnnnnnnnnnnnnnnnnnnnnnnnnnnnnnnnnnnnnnnnnnnnnnnnnnnnnnnnnnnnnnnnnnnnnnnnnnnnnnnnnnnnnnnnnnnnnnnnnnnnnnnnnnnnnnnnnnnnnnnnnnnnnnnnnnnnnnnnnnnnnnnnnnnnnnnnnnnnnnnnnnnnnnnnnnnnnnnnnnnnnnnnnnnnnnnnnnnnnnnnnnnnnnnnnnnnnnnnnnnnnnnnnnnnnnnnnnnnnnnnnnnnnnnnnnnnnnnnnnnnnnnnnnnnnnnnnnnnnnnnnnnnnnnnnnnnnnnnnnnnnnnnnnnnnnnnnnnnnnnnnnnnnnnnnnnnnnnnnnnnnnnnnnnnnnnnnnnnnnnnnnnnnnnnnnnnnnnnnnnnnnnnnnnnnnnnnnnnnnnnnnnnnnnnnnnnnnnnnnnnnnnnnnnnnnnnnnnnnnnnnnnnnnnnnnnnnnnnnnnnnnnnnnnnnnnnnnnnnnnnnnnnnnnnnnnnnnnnnnnnnnnnnnnnnnnnnnnnnnnnnnnnnnnnnnnnnnnnnnnnnnnnnnnnnnnnnnnnnnnnnnnnnnnnnnnnnnnnnnnnnnnnnnnnnnnnnnnnnnnnnnnnnnnnnnnnnnnnnnnnnnnnnnnnnnnnnnnnnnnnnnnnnnnnnnnnnnnnnnnnnnnnnnnnnnnnnnnnnnnnnnnnnnnnnnnnnnnnnnnnnnnnnnnnnnnnnnnnnnnnnnnnnnnnnnnnnnnnnnnnnnnnnnnnnnnnnnnnnnnnnnnnnnnnnnnnnnnnnnnnnnnnnnnnnnnnnnnnnnnnnnnnnnnnnnnnnnnnnnnnnnnnnnnnnnnnnnnnnnnnnnnnnnnnnnnnnnnnnnnnnnnnnnnnnnnnnnnnnnnnnnnnnnnnnnnnnnnnnnnnnnnnnnnnnnnnnnnnnnnnnnnnnnnnnnnnnnnnnnnnnnnnnnnnnnnnnnnnnnnnnnnnnnnnnnnnnnnnnnnnnnnnnnnnnnnnnnnnnnnnnnnnnnnnnnnnnnnnnnnnnnnnnnnnnnnnnnnnnnnnnnnnnnnnnnnnnnnnnnnnnnnnnnnnnnnnnnnnnnnnnnnnnnnnnnnnnnnnnnnnnnnnnnnnnnnnnnnnnnnnnnnnnnnnnnnnnnnnnnnnnnnnnnnnnnnnnnnnnnnnnnnnnnnnnnnnnnnnnnnnnnnnnnnnnnnnnnnnnnnnnnnnnnnnnnnnnnnnnnnnnnnnnnnnnnnnnnnnnnnnnnnnnnnnnnnnnnnnnnnnnnnnnnnnnnnnnnnnnnnnnnnnnnnnnnnnnnnnnnnnnnnnnnnnnnnnnnnnnnnnnnnnnnnnnnnnnnnnnnnnnnnnnnnnnnnnnnnnnnnnnnnnnnnnnnnnnnnnnnnnnnnnnnnnnnnnnnnnnnnnnnnnnnnnnnnnnnnnnnnnnnnnnnnnnnnnnnnnnnnnnnnnnnnnnnnnnnnnnnnnnnnnnnnnnnnnnnnnnnnnnnnnnnnnnnnnnnnnnnnnnnnnnnnnnnnnnnnnnnnnnnnnnnnnnnnnnnnnnnnnnnnnnnnnnnnnnnnnnnnnnnnnnnnnnnnnnnnnnnnnnnnnnnnnnnnnnnnnnnnnnnnnnnnnnnnnnnnnnnnnnnnnnnnnnnnnnnnnnnnnnnnnnnnnnnnnnnnnnnnnnnnnnnnnnnnnnnnnnnnnnnnnnnnnnnnnnnnnnnnnnnnnnnnnnnnnnnnnnnnnnnnnnnnnnnnnnnnnnnnnnnnnnnnnnnnnnnnnnnnnnnnnnnnnnnnnnnnnnnnnnnnnnnnnnnnnnnnnnnnnnnnnnnnnnnnnnnnnnnnnnnnnnnnnnnnnnnnnnnnnnnnnnnnnnnnnnnnnnnnnnnnnnnnnnnnnnnnnnnnnnnnnnnnnnnnnnnnnnnnnnnnnnnnnnnnnnnnnnnnnnnnnnnnnnnnnnnnnnnnnnnnnnnnnnnnnnnnnnnnnnnnnnnnnnnnnnnnnnnnnnnnnnnnnnnnnnnnnnnnnnnnnnnnnnnnnnnnnnnnnnnnnnnnnnnnnnnnnnnnnnnnnnnnnnnnnnnnnnnnnnnnnnnnnnnnnnnnnnnnnnnnnnnnnnnnnnnnnnnnnnnnnnnnnnnnnnnnnnnnnnnnnnnnnnnnnnnnnnnnnnnnnnnnnnnnnnnnnnnnnnnnnnnnnnnnnnnnnnnnnnnnnnnnnnnnnnnnnnnnnnnnnnnnnnnnnnnnnnnnnnnnnnnnnnnnnnnnnnnnnnnnnnnnnnnnnnnnnnnnnnnnnnnnnnnnnnnnnnnnnnnnnnnnnnnnnnnnnnnnnnnnnnnnnnnnnnnnnnnnnnnnnnnnnnnnnnnnnnnnnnnnnnnnnnnnnnnnnnnnnnnnnnnnnnnnnnnnnnnnnnnnnnnnnnnnnnnnnnnnnnnnnnnnnnnnnnnnnnnnnnnnnnnnnnnnnnnnnnnnnnnnnnnnnnnnnnnnnnnnnnnnnnnnnnnnnnnnnnnnnnnnnnnnnnnnnnnnnnnnnnnnnnnnnnnnnnnnnnnnnnnnnnnnnnnnnnnnnnnnnnnnnnnnnnnnnnnnnnnnnnnnnnnnnnnnnnnnnnnnnnnnnnnnnnnnnnnnnnnnnnnnnnnnnnnnnnnnnnnnnnnnnnnnnnnnnnnnnnnnnnnnnnnnnnnnnnnnnnnnnnnnnnnnnnnnnnnnnnnnnnnnnnnnnnnnnnnnnnnnnnnnnnnnnnnnnnnnnnnnnnnnnnnnnnnnnnnnnnnnnnnnnnnnnnnnnnnnnnnnnnnnnnnnnnnnnnnnnnnnnnnnnnnnnnnnnnnnnnnnnnnnnnnnnnnnnnnnnnnnnnnnnnnnnnnnnnnnnnnnnnnnnnnnnnnnnnnnnnnnnnnnnnnnnnnnnnnnnnnnnnnnnnnnnnnnnnnnnnnnnnnnnnnnnnnnnnnnnnnnnnnnnnnnnnnnnnnnnnnnnnnnnnnnnnnnnnnnnnnnnnnnnnnnnnnnnnnnnnnnnnnnnnnnnnnnnnnnnnnnnnnnnnnnnnnnnnnnnnnnnnnnnnnnnnnnnnnnnnnnnnnnnnnnnnnnnnnnnnnnnnnnnnnnnnnnnnnnnnnnnnnnnnnnnnnnnnnnnnnnnnnnnnnnnnnnnnnnnnnnnnnnnnnnnnnnnnnnnnnnnnnnnnnnnnnnnnnnnnnnnnnnnnnnnnnnnnnnnnnnnnnnnnnnnnnnnnnnnnnnnnnnnnnnnnnnnnnnnnnnnnnnnnnnnnnnnnnnnnnnnnnnnnnnnnnnnnnnnnnnnnnnnnnnnnnnnnnnnnnnnnnnnnnnnnnnnnnnnnnnnnnnnnnnnnnnnnnnnnnnnnnnnnnnnnnnnnnnnnnnnnnnnnnnnnnnnnnnnnnnnnnnnnnnnnnnnnnnnnnnnnnnnnnnnnnnnnnnnnnnnnnnnnnnnnnnnnnnnnnnnnnnnnnnnnnnnnnnnnnnnnnnnnnnnnnnnnnnnnnnnnnnnnnnnnnnnnnnnnnnnnnnnnnnnnnnnnnnnnnnnnnnnnnnnnnnnnnnnnnnnnnnnnnnnnnnnnnnnnnnnnnnnnnnnnnnnnnnnnnnnnnnnnnnnnnnnnnnnnnnnnnnnnnnnnnnnnnnnnnnnnnnnnnnnnnnnnnnnnnnnnnnnnnnnnnnnnnnnnnnnnnnnnnnnnnnnnnnnnnnnnnnnnnnnnnnnnnnnnnnnnnnnnnnnnnnnnnnnnnnnnnnnnnnnnnnnnnnnnnnnnnnnnnnnnnnnnnnnnnnnnnnnnnnnnnnnnnnnnnnnnnnnnnnnnnnnnnnnnnnnnnnnnnnnnnnnnnnnnnnnnnnnnnnnnnnnnnnnnnnnnnnnnnnnnnnnnnnnnnnnnnnnnnnnnnnnnnnnnnnnnnnnnnnnnnnnnnnnnnnnnnnnnnnnnnnnnnnnnnnnnnnnnnnnnnnnnnnnnnnnnnnnnnnnnnnnnnnnnnnnnnnnnnnnnnnnnnnnnnnnnnnnnnnnnnnnnnnnnnnnnnnnnnnnnnnnnnnnnnnnnnnnnnnnnnnnnnnnnnnnnnnnnnnnnnnnnnnnnnnnnnnnnnnnnnnnnnnnnnnnnnnnnnnnnnnnnnnnnnnnnnnnnnnnnnnnnnnnnnnnnnnnnnnnnnnnnnnnnnnnnnnnnnnnnnnnnnnnnnnnnnnnnnnnnnnnnnnnnnnnnnnnnnnnnnnnnnnnnnnnnnnnnnnnnnnnnnnnnnnnnnnnnnnnnnnnnnnnnnnnnnnnnnnnnnnnnnnnnnnnnnnnnnnnnnnnnnnnnnnnnnnnnnnnnnnnnnnnnnnnnnnnnnnnnnnnnnnnnnnnnnnnnnnnnnnnnnnnnnnnnnnnnnnnnnnnnnnnnnnnnnnnnnnnnnnnnnnnnnnnnnnnnnnnnnnnnnnnnnnnnnnnnnnnnnnnnnnnnnnnnnnnnnnnnnnnnnnnnnnnnnnnnnnnnnnnnnnnnnnnnnnnnnnnnnnnnnnnnnnnnnnnnnnnnnnnnnnnnnnnnnnnnnnnnnnnnnnnnnnnnnnnnnnnnnnnnnnnnnnnnnnnnnnnnnnnnnnnnnnnnnnnnnnnnnnnnnnnnnnnnnnnnnnnnnnnnnnnnnnnnnnnnnnnnnnnnnnnnnnnnnnnnnnnnnnnnnnnnnnnnnnnnnnnnnnnnnnnnnnnnnnnnnnnnnnnnnnnnnnnnnnnnnnnnnnnnnnnnnnnnnnnnnnnnnnnnnnnnnnnnnnnnnnnnnnnnnnnnnnnnnnnnnnnnnnnnnnnnnnnnnnnnnnnnnnnnnnnnnnnnnnnnnnnnnnnnnnnnnnnnnnnnnnnnnnnnnnnnnnnnnnnnnnnnnnnnnnnnnnnnnnnnnnnnnnnnnnnnnnnnnnnnnnnnnnnnnnnnnnnnnnnnnnnnnnnnnnnnnnnnnnnnnnnnnnnnnnnnnnnnnnnnnnnnnnnnnnnnnnnnnnnnnnnnnnnnnnnnnnnnnnnnnnnnnnnnnnnnnnnnnnnnnnnnnnnnnnnnnnnnnnnnnnnnnnnnnnnnnnnnnnnnnnnnnnnnnnnnnnnnnnnnnnnnnnnnnnnnnnnnnnnnnnnnnnnnnnnnnnnnnnnnnnnnnnnnnnnnnnnnnnnnnnnnnnnnnnnnnnnnnnnnnnnnnnnnnnnnnnnnnnnnnnnnnnnnnnnnnnnnnnnnnnnnnnnnnnnnnnnnnnnnnnnnnnnnnnnnnnnnnnnnnnnnnnnnnnnnnnnnnnnnnnnnnnnnnnnnnnnnnnnnnnnnnnnnnnnnnnnnnnnnnnnnnnnnnnnnnnnnnnnnnnnnnnnnnnnnnnnnnnnnnnnnnnnnnnnnnnnnnnnnnnnnnnnnnnnnnnnnnnnnnnnnnnnnnnnnnnnnnnnnnnnnnnnnnnnnnnnnnnnnnnnnnnnnnnnnnnnnnnnnnnnnnnnnnnnnnnnnnnnnnnnnnnnnnnnnnnnnnnnnnnnnnnnnnnnnnnnnnnnnnnnnnnnnnnnnnnnnnnnnnnnnnnnnnnnnnnnnnnnnnnnnnnnnnnnnnnnnnnnnnnnnnnnnnnnnnnnnnnnnnnnnnnnnnnnnnnnnnnnnnnnnnnnnnnnnnnnnnnnnnnnnnnnnnnnnnnnnnnnnnnnnnnnnnnnnnnnnnnnnnnnnnnnnnnnnnnnnnnnnnnnnnnnnnnnnnnnnnnnnnnnnnnnnnnnnnnnnnnnnnnnnnnnnnnnnnnnnnnnnnnnnnnnnnnnnnnnnnnnnnnnnnnnnnnnnnnnnnnnnnnnnnnnnnnnnnnnnnnnnnnnnnnnnnnnnnnnnnnnnnnnnnnnnnnnnnnnnnnnnnnnnnnnnnnnnnnnnnnnnnnnnnnnnnnnnnnnnnnnnnnnnnnnnnnnnnnnnnnnnnnnnnnnnnnnnnnnnnnnnnnnnnnnnnnnnnnnnnnnnnnnnnnnnnnnnnnnnnnnnnnnnnnnnnnnnnnnnnnnnnnnnnnnnnnnnnnnnnnnnnnnnnnnnnnnnnnnnnnnnnnnnnnnnnnnnnnnnnnnnnnnnnnnnnnnnnnnnnnnnnnnnnnnnnnnnnnnnnnnnnnnnnnnnnnnnnnnnnnnnnnnnnnnnnnnnnnnnnnnnnnnnnnnnnnnnnnnnnnnnnnnnnnnnnnnnnnnnnnnnnnnnnnnnnnnnnnnnnnnnnnnnnnnnnnnnnnnnnnnnnnnnnnnnnnnnnnnnnnnnnnnnnnnnnnnnnnnnnnnnnnnnnnnnnnnnnnnnnnnnnnnnnnnnnnnnnnnnnnnnnnnnnnnnnnnnnnnnnnnnnnnnnnnnnnnnnnnnnnnnnnnnnnnnnnnnnnnnnnnnnnnnnnnnnnnnnnnnnnnnnnnnnnnnnnnnnnnnnnnnnnnnnnnnnnnnnnnnnnnnnnnnnnnnnnnnnnnnnnnnnnnnnnnnnnnnnnnnnnnnnnnnnnnnnnnnnnnnnnnnnnnnnnnnnnnnnnnnnnnnnnnnnnnnnnnnnnnnnnnnnnnnnnnnnnnnnnnnnnnnnnnnnnnnnnnnnnnnnnnnnnnnnnnnnnnnnnnnnnnnnnnnnnnnnnnnnnnnnnnnnnnnnnnnnnnnnnnnnnnnnnnnnnnnnnnnnnnnnnnnnnnnnnnnnnnnnnnnnnnnnnnnnnnnnnnnnnnnnnnnnnnnnnnnnnnnnnnnnnnnnnnnnnnnnnnnnnnnnnnnnnnnnnnnnnnnnnnnnnnnnnnnnnnnnnnnnnnnnnnnnnnnnnnnnnnnnnnnnnnnnnnnnnnnnnnnnnnnnnnnnnnnnnnnnnnnnnnnnnnnnnnnnnnnnnnnnnnnnnnnnnnnnnnnnnnnnnnnnnnnnnnnnnnnnnnnnnnnnnnnnnnnnnnnnnnnnnnnnnnnnnnnnnnnnnnnnnnnnnnnnnnnnnnnnnnnnnnnnnnnnnnnnnnnnnnnnnnnnnnnnnnnnnnnnnnnnnnnnnnnnnnnnnnnnnnnnnnnnnnnnnnnnnnnnnnnnnnnnnnnnnnnnnnnnnnnnnnnnnnnnnnnnnnnnnnnnnnnnnnnnnnnnnnnnnnnnnnnnnnnnnnnnnnnnnnnnnnnnnnnnnnnnnnnnnnnnnnnnnnnnnnnnnnnnnnnnnnnnnnnnnnnnnnnnnnnnnnnnnnnnnnnnnnnnnnnnnnnnnnnnnnnnnnnnnnnnnnnnnnnnnnnnnnnnnnnnnnnnnnnnnnnnnnnnnnnnnnnnnnnnnnnnnnnnnnnnnnnnnnnnnnnnnnnnnnnnnnnnnnnnnnnnnnnnnnnnnnnnnnnnnnnnnnnnnnnnnnnnnnnnnnnnnnnnnnnnnnnnnnnnnnnnnnnnnnnnnnnnnnnnnnnnnnnnnnnnnnnnnnnnnnnnnnnnnnnnnnnnnnnnnnnnnnnnnnnnnnnnnnnnnnnnnnnnnnnnnnnnnnnnnnnnnnnnnnnnnnnnnnnnnnnnnnnnnnnnnnnnnnnnnnnnnnnnnnnnnnnnnnnnnnnnnnnnnnnnnnnnnnnnnnnnnnnnnnnnnnnnnnnnnnnnnnnnnnnnnnnnnnnnnnnnnnnnnnnnnnnnnnnnnnnnnnnnnnnnnnnnnnnnnnnnnnnnnnnnnnnnnnnnnnnnnnnnnnnnnnnnnnnnnnnnnnnnnnnnnnnnnnnnnnnnnnnnnnnnnnnnnnnnnnnnnnnnnnnnnnnnnnnnnnnnnnnnnnnnnnnnnnnnnnnnnnnnnnnnnnnnnnnnnnnnnnnnnnnnnnnnnnnnnnnnnnnnnnnnnnnnnnnnnnnnnnnnnnnnnnnnnnnnnnnnnnnnnnnnnnnnnnnnnnnnnnnnnnnnnnnnnnnnnnnnnnnnnnnnnnnnnnnnnnnnnnnnnnnnnnnnnnnnnnnnnnnnnnnnnnnnnnnnnnnnnnnnnnnnnnnnnnnnnnnnnnnnnnnnnnnnnnnnnnnnnnnnnnnnnnnnnnnnnnnnnnnnnnnnnnnnnnnnnnnnnnnnnnnnnnnnnnnnnnnnnnnnnnnnnnnnnnnnnnnnnnnnnnnnnnnnnnnnnnnnnnnnnnnnnnnnnnnnnnnnnnnnnnnnnnnnnnnnnnnnnnnnnnnnnnnnnnnnnnnnnnnnnnnnnnnnnnnnnnnnnnnnnnnnnnnnnnnnnnnnnnnnnnnnnnnnnnnnnnnnnnnnnnnnnnnnnnnnnnnnnnnnnnnnnnnnnnnnnnnnnnnnnnnnnnnnnnnnnnnnnnnnnnnnnnnnnnnnnnnnnnnnnnnnnnnnnnnnnnnnnnnnnnnnnnnnnnnnnnnnnnnnnnnnnnnnnnnnnnnnnnnnnnnnnnnnnnnnnnnnnnnnnnnnnnnnnnnnnnnnnnnnnnnnnnnnnnnnnnnnnnnnnnnnnnnnnnnnnnnnnnnnnnnnnnnnnnnnnnnnnnnnnnnnnnnnnnnnnnnnnnnnnnnnnnnnnnnnnnnnnnnnnnnnnnnnnnnnnnnnnnnnnnnnnnnnnnnnnnnnnnnnnnnnnnnnnnnnnnnnnnnnnnnnnnnnnnnnnnnnnnnnnnnnnnnnnnnnnnnnnnnnnnnnnnnnnnnnnnnnnnnnnnnnnnnnnnnnnnnnnnnnnnnnnnnnnnnnnnnnnnnnnnnnnnnnnnnnnnnnnnnnnnnnnnnnnnnnnnnnnnnnnnnnnnnnnnnnnnnnnnnnnnnnnnnnnnnnnnnnnnnnnnnnnnnnnnnnnnnnnnnnnnnnnnnnnnnnnnnnnnnnnnnnnnnnnnnnnnnnnnnnnnnnnnnnnnnnnnnnnnnnnnnnnnnnnnnnnnnnnnnnnnnnnnnnnnnnnnnnnnnnnnnnnnnnnnnnnnnnnnnnnnnnnnnnnnnnnnnnnnnnnnnnnnnnnnnnnnnnnnnnnnnnnnnnnnnnnnnnnnnnnnnnnnnnnnnnnnnnnnnnnnnnnnnnnnnnnnnnnnnnnnnnnnnnnnnnnnnnnnnnnnnnnnnnnnnnnnnnnnnnnnnnnnnnnnnnnnnnnnnnnnnnnnnnnnnnnnnnnnnnnnnnnnnnnnnnnnnnnnnnnnnnnnnnnnnnnnnnnnnnnnnnnnnnnnnnnnnnnnnnnnnnnnnnnnnnnnnnnnnnnnnnnnnnnnnnnnnnnnnnnnnnnnnnnnnnnnnnnnnnnnnnnnnnnnnnnnnnnnnnnnnnnnnnnnnnnnnnnnnnnnnnnnnnnnnnnnnnnnnnnnnnnnnnnnnnnnnnnnnnnnnnnnnnnnnnnnnnnnnnnnnnnnnnnnnnnnnnnnnnnnnnnnnnnnnnnnnnnnnnnnnnnnnnnnnnnnnnnnnnnnnnnnnnnnnnnnnnnnnnnnnnnnnnnnnnnnnnnnnnnnnnnnnnnnnnnnnnnnnnnnnnnnnnnnnnnnnnnnnnnnnnnnnnnnnnnnnnnnnnnnnnnnnnnnnnnnnnnnnnnnnnnnnnnnnnnnnnnnnnnnnnnnnnnnnnnnnnnnnnnnnnnnnnnnnnnnnnnnnnnnnnnnnnnnnnnnnnnnnnnnnnnnnnnnnnnnnnnnnnnnnnnnnnnnnnnnnnnnnnnnnnnnnnnnnnnnnnnnnnnnnnnnnnnnnnnnnnnnnnnnnnnnnnnnnnnnnnnnnnnnnnnnnnnnnnnnnnnnnnnnnnnnnnnnnnnnnnnnnnnnnnnnnnnnnnnnnnnnnnnnnnnnnnnnnnnnnnnnnnnnnnnnnnnnnnnnnnnnnnnnnnnnnnnnnnnnnnnnnnnnnnnnnnnnnnnnnnnnnnnnnnnnnnnnnnnnnnnnnnnnnnnnnnnnnnnnnnnnnnnnnnnnnnnnnnnnnnnnnnnnnnnnnnnnnnnnnnnnnnnnnnnnnnnnnnnnnnnnnnnnnnnnnnnnnnnnnnnnnnnnnnnnnnnnnnnnnnnnnnnnnnnnnnnnnnnnnnnnnnnnnnnnnnnnnnnnnnnnnnnnnnnnnnnnnnnnnnnnnnnnnnnnnnnnnnnnnnnnnnnnnnnnnnnnnnnnnnnnnnnnnnnnnnnnnnnnnnnnnnnnnnnnnnnnnnnnnnnnnnnnnnnnnnnnnnnnnnnnnnnnnnnnnnnnnnnnnnnnnnnnnnnnnnnnnnnnnnnnnnnnnnnnnnnnnnnnnnnnnnnnnnnnnnnnnnnnnnnnnnnnnnnnnnnnnnnnnnnnnnnnnnnnnnnnnnnnnnnnnnnnnnnnnnnnnnnnnnnnnnnnnnnnnnnnnnnnnnnnnnnnnnnnnnnnnnnnnnnnnnnnnnnnnnnnnnnnnnnnnnnnnnnnnnnnnnnnnnnnnnnnnnnnnnnnnnnnnnnnnnnnnnnnnnnnnnnnnnnnnnnnnnnnnnnnnnnnnnnnnnnnnnnnnnnnnnnnnnnnnnnnnnnnnnnnnnnnnnnnnnnnnnnnnnnnnnnnnnnnnnnnnnnnnnnnnnnnnnnnnnnnnnnnnnnnnnnnnnnnnnnnnnnnnnnnnnnnnnnnnnnnnnnnnnnnnnnnnnnnnnnnnnnnnnnnnnnnnnnnnnnnnnnnnnnnnnnnnnnnnnnnnnnnnnnnnnnnnnnnnnnnnnnnnnnnnnnnnnnnnnnnnnnnnnnnnnnnnnnnnnnnnnnnnnnnnnnnnnnnnnnnnnnnnnnnnnnnnnnnnnnnnnnnnnnnnnnnnnnnnnnnnnnnnnnnnnnnnnnnnnnnnnnnnnnnnnnnnnnnnnnnnnnnnnnnnnnnnnnnnnnnnnnnnnnnnnnnnnnnnnnnnnnnnnnnnnnnnnnnnnnnnnnnnnnnnnnnnnnnnnnnnnnnnnnnnnnnnnnnnnnnnnnnnnnnnnnnnnnnnnnnnnnnnnnnnnnnnnnnnnnnnnnnnnnnnnnnnnnnnnnnnnnnnnnnnnnnnnnnnnnnnnnnnnnnnnnnnnnnnnnnnnnnnnnnnnnnnnnnnnnnnnnnnnnnnnnnnnnnnnnnnnnnnnnnnnnnnnnnnnnnnnnnnnnnnnnnnnnnnnnnnnnnnnnnnnnnnnnnnnnnnnnnnnnnnnnnnnnnnnnnnnnnnnnnnnnnnnnnnnnnnnnnnnnnnnnnnnnnnnnnnnnnnnnnnnnnnnnnnnnnnnnnnnnnnnnnnnnnnnnnnnnnnnnnnnnnnnnnnnnnnnnnnnnnnnnnnnnnnnnnnnnnnnnnnnnnnnnnnnnnnnnnnnnnnnnnnnnnnnnnnnnnnnnnnnnnnnnnnnnnnnnnnnnnnnnnnnnnnnnnnnnnnnnnnnnnnnnnnnnnnnnnnnnnnnnnnnnnnnnnnnnnnnnnnnnnnnnnnnnnnnnnnnnnnnnnnnnnnnnnnnnnnnnnnnnnnnnnnnnnnnnnnnnnnnnnnnnnnnnnnnnnnnnnnnnnnnnnnnnnnnnnnnnnnnnnnnnnnnnnnnnnnnnnnnnnnnnnnnnnnnnnnnnnnnnnnnnnnnnnnnnnnnnnnnnnnnnnnnnnnnnnnnnnnnnnnnnnnnnnnnnnnnnnnnnnnnnnnnnnnnnnnnnnnnnnnnnnnnnnnnnnnnnnnnnnnnnnnnnnnnnnnnnnnnnnnnnnnnnnnnnnnnnnnnnnnnnnnnnnnnnnnnnnnnnnnnnnnnnnnnnnnnnnnnnnnnnnnnnnnnnnnnnnnnnnnnnnnnnnnnnnnnnnnnnnnnnnnnnnnnnnnnnnnnnnnnnnnnnnnnnnnnnnnnnnnnnnnnnnnnnnnnnnnnnnnnnnnnnnnnnnnnnnnnnnnnnnnnnnnnnnnnnnnnnnnnnnnnnnnnnnnnnnnnnnnnnnnnnnnnnnnnnnnnnnnnnnnnnnnnnnnnnnnnnnnnnnnnnnnnnnnnnnnnnnnnnnnnnnnnnnnnnnnnnnnnnnnnnnnnnnnnnnnnnnnnnnnnnnnnnnnnnnnnnnnnnnnnnnnnnnnnnnnnnnnnnnnnnnnnnnnnnnnnnnnnnnnnnnnnnnnnnnnnnnnnnnnnnnnnnnnnnnnnnnnnnnnnnnnnnnnnnnnnnnnnnnnnnnnnnnnnnnnnnnnnnnnnnnnnnnnnnnnnnnnnnnnnnnnnnnnnnnnnnnnnnnnnnnnnnnnnnnnnnnnnnnnnnnnnnnnnnnnnnnnnnnnnnnnnnnnnnnnnnnnnnnnnnnnnnnnnnnnnnnnnnnnnnnnnnnnnnnnnnnnnnnnnnnnnnnnnnnnnnnnnnnnnnnnnnnnnnnnnnnnnnnnnnnnnnnnnnnnnnnnnnnnnnnnnnnnnnnnnnnnnnnnnnnnnnnnnnnnnnnnnnnnnnnnnnnnnnnnnnnnnnnnnnnnnnnnnnnnnnnnnnnnnnnnnnnnnnnnnnnnnnnnnnnnnnnnnnnnnnnnnnnnnnnnnnnnnnnnnnnnnnnnnnnnnnnnnnnnnnnnnnnnnnnnnnnnnnnnnnnnnnnnnnnnnnnnnnnnnnnnnnnnnnnnnnnnnnnnnnnnnnnnnnnnnnnnnnnnnnnnnnnnnnnnnnnnnnnnnnnnnnnnnnnnnnnnnnnnnnnnnnnnnnnnnnnnnnnnnnnnnnnnnnnnnnnnnnnnnnnnnnnnnnnnnnnnnnnnnnnnnnnnnnnnnnnnnnnnnnnnnnnnnnnnnnnnnnnnnnnnnnnnnnnnnnnnnnnnnnnnnnnnnnnnnnnnnnnnnnnnnnnnnnnnnnnnnnnnnnnnnnnnnnnnnnnnnnnnnnnnnnnnnnnnnnnnnnnnnnnnnnnnnnnnnnnnnnnnnnnnnnnnnnnnnnnnnnnnnnnnnnnnnnnnnnnnnnnnnnnnnnnnnnnnnnnnnnnnnnnnnnnnnnnnnnnnnnnnnnnnnnnnnnnnnnnnnnnnnnnnnnnnnnnnnnnnnnnnnnnnnnnnnnnnnnnnnnnnnnnnnnnnnnnnnnnnnnnnnnnnnnnnnnnnnnnnnnnnnnnnnnnnnnnnnnnnnnnnnnnnnnnnnnnnnnnnnnnnnnnnnnnnnnnnnnnnnnnnnnnnnnnnnnnnnnnnnnnnnnnnnnnnnnnnnnnnnnnnnnnnnnnnnnnnnnnnnnnnnnnnnnnnnnnnnnnnnnnnnnnnnnnnnnnnnnnnnnnnnnnnnnnnnnnnnnnnnnnnnnnnnnnnnnnnnnnnnnnnnnnnnnnnnnnnnnnnnnnnnnnnnnnnnnnnnnnnnnnnnnnnnnnnnnnnnnnnnnnnnnnnnnnnnnnnnnnnnnnnnnnnnnnnnnnnnnnnnnnnnnnnnnnnnnnnnnnnnnnnnnnnnnnnnnnnnnnnnnnnnnnnnnnnnnnnnnnnnnnnnnnnnnnnnnnnnnnnnnnnnnnnnnnnnnnnnnnnnnnnnnnnnnnnnnnnnnnnnnnnnnnnnnnnnnnnnnnnnnnnnnnnnnnnnnnnnnnnnnnnnnnnnnnnnnnnnnnnnnnnnnnnnnnnnnnnnnnnnnnnnnnnnnnnnnnnnnnnnnnnnnnnnnnnnnnnnnnnnnnnnnnnnnnnnnnnnnnnnnnnnnnnnnnnnnnnnnnnnnnnnnnnnnnnnnnnnnnnnnnnnnnnnnnnnnnnnnnnnnnnnnnnnnnnnnnnnnnnnnnnnnnnnnnnnnnnnnnnnnnnnnnnnnnnnnnnnnnnnnnnnnnnnnnnnnnnnnnnnnnnnnnnnnnnnnnnnnnnnnnnnnnnnnnnnnnnnnnnnnnnnnnnnnnnnnnnnnnnnnnnnnnnnnnnnnnnnnnnnnnnnnnnnnnnnnnnnnnnnnnnnnnnnnnnnnnnnnnnnnnnnnnnnnnnnnnnnnnnnnnnnnnnnnnnnnnnnnnnnnnnnnnnnnnnnnnnnnnnnnnnnnnnnnnnnnnnnnnnnnnnnnnnnnnnnnnnnnnnnnnnnnnnnnnnnnnnnnnnnnnnnnnnnnnnnnnnnnnnnnnnnnnnnnnnnnnnnnnnnnnnnnnnnnnnnnnnnnnnnnnnnnnnnnnnnnnnnnnnnnnnnnnnnnnnnnnnnnnnnnnnnnnnnnnnnnnnnnnnnnnnnnnnnnnnnnnnnnnnnnnnnnnnnnnnnnnnnnnnnnnnnnnnnnnnnnnnnnnnnnnnnnnnnnnnnnnnnnnnnnnnnnnnnnnnnnnnnnnnnnnnnnnnnnnnnnnnnnnnnnnnnnnnnnnnnnnnnnnnnnnnnnnnnnnnnnnnnnnnnnnnnnnnnnnnnnnnnnnnnnnnnnnnnnnnnnnnnnnnnnnnnnnnnnnnnnnnnnnnnnnnnnnnnnnnnnnnnnnnnnnnnnnnnnnnnnnnnnnnnnnnnnnnnnnnnnnnnnnnnnnnnnnnnnnnnnnnnnnnnnnnnnnnnnnnnnnnnnnnnnnnnnnnnnnnnnnnnnnnnnnnnnnnnnnnnnnnnnnnnnnnnnnnnnnnnnnnnnnnnnnnnnnnnnnnnnnnnnnnnnnnnnnnnnnnnnnnnnnnnnnnnnnnnnnnnnnnnnnnnnnnnnnnnnnnnnnnnnnnnnnnnnnnnnnnnnnnnnnnnnnnnnnnnnnnnnnnnnnnnnnnnnnnnnnnnnnnnnnnnnnnnnnnnnnnnnnnnnnnnnnnnnnnnnnnnnnnnnnnnnnnnnnnnnnnnnnnnnnnnnnnnnnnnnnnnnnnnnnnnnnnnnnnnnnnnnnnnnnnnnnnnnnnnnnnnnnnnnnnnnnnnnnnnnnnnnnnnnnnnnnnnnnnnnnnnnnnnnnnnnnnnnnnnnnnnnnnnnnnnnnnnnnnnnnnnnnnnnnnnnnnnnnnnnnnnnnnnnnnnnnnnnnnnnnnnnnnnnnnnnnnnnnnnnnnnnnnnnnnnnnnnnnnnnnnnnnnnnnnnnnnnnnnnnnnnnnnnnnnnnnnnnnnnnnnnnnnnnnnnnnnnnnnnnnnnnnnnnnnnnnnnnnnnnnnnnnnnnnnnnnnnnnnnnnnnnnnnnnnnnnnnnnnnnnnnnnnnnnnnnnnnnnnnnnnnnnnnnnnnnnnnnnnnnnnnnnnnnnnnnnnnnnnnnnnnnnnnnnnnnnnnnnnnnnnnnnnnnnnnnnnnnnnnnnnnnnnnnnnnnnnnnnnnnnnnnnnnnnnnnnnnnnnnnnnnnnnnnnnnnnnnnnnnnnnnnnnnnnnnnnnnnnnnnnnnnnnnnnnnnnnnnnnnnnnnnnnnnnnnnnnnnnnnnnnnnnnnnnnnnnnnnnnnnnnnnnnnnnnnnnnnnnnnnnnnnnnnnnnnnnnnnnnnnnnnnnnnnnnnnnnnnnnnnnnnnnnnnnnnnnnnnnnnnnnnnnnnnnnnnnnnnnnnnnnnnnnnnnnnnnnnnnnnnnnnnnnnnnnnnnnnnnnnnnnnnnnnnnnnnnnnnnnnnnnnnnnnnnnnnnnnnnnnnnnnnnnnnnnnnnnnnnnnnnnnnnnnnnnnnnnnnnnnnnnnnnnnnnnnnnnnnnnnnnnnnnnnnnnnnnnnnnnnnnnnnnnnnnnnnnnnnnnnnnnnnnnnnnnnnnnnnnnnnnnnnnnnnnnnnnnnnnnnnnnnnnnnnnnnnnnnnnnnnnnnnnnnnnnnnnnnnnnnnnnnnnnnnnnnnnnnnnnnnnnnnnnnnnnnnnnnnnnnnnnnnnnnnnnnnnnnnnnnnnnnnnnnnnnnnnnnnnnnnnnnnnnnnnnnnnnnnnnnnnnnnnnnnnnnnnnnnnnnnnnnnnnnnnnnnnnnnnnnnnnnnnnnnnnnnnnnnnnnnnnnnnnnnnnnnnnnnnnnnnnnnnnnnnnnnnnnnnnnnnnnnnnnnnnnnnnnnnnnnnnnnnnnnnnnnnnnnnnnnnnnnnnnnnnnnnnnnnnnnnnnnnnnnnnnnnnnnnnnnnnnnnnnnnnnnnnnnnnnnnnnnnnnnnnnnnnnnnnnnnnnnnnnnnnnnnnnnnnnnnnnnnnnnnnnnnnnnnnnnnnnnnnnnnnnnnnnnnnnnnnnnnnnnnnnnnnnnnnnnnnnnnnnnnnnnnnnnnnnnnnnnnnnnnnnnnnnnnnnnnnnnnnnnnnnnnnnnnnnnnnnnnnnnnnnnnnnnnnnnnnnnnnnnnnnnnnnnnnnnnnnnnnnnnnnnnnnnnnnnnnnnnnnnnnnnnnnnnnnnnnnnnnnnnnnnnnnnnnnnnnnnnnnnnnnnnnnnnnnnnnnnnnnnnnnnnnnnnnnnnnnnnnnnnnnnnnnnnnnnnnnnnnnnnnnnnnnnnnnnnnnnnnnnnnnnnnnnnnnnnnnnnnnnnnnnnnnnnnnnnnnnnnnnnnnnnnnnnnnnnnnnnnnnnnnnnnnnnnnnnnnnnnnnnnnnnnnnnnnnnnnnnnnnnnnnnnnnnnnnnnnnnnnnnnnnnnnnnnnnnnnnnnnnnnnnnnnnnnnnnnnnnnnnnnnnnnnnnnnnnnnnnnnnnnnnnnnnnnnnnnnnnnnnnnnnnnnnnnnnnnnnnnnnnnnnnnnnnnnnnnnnnnnnnnnnnnnnnnnnnnnnnnnnnnnnnnnnnnnnnnnnnnnnnnnnnnnnnnnnnnnnnnnnnnnnnnnnnnnnnnnnnnnnnnnnnnnnnnnnnnnnnnnnnnnnnnnnnnnnnnnnnnnnnnnnnnnnnnnnnnnnnnnnnnnnnnnnnnnnnnnnnnnnnnnnnnnnnnnnnnnnnnnnnnnnnnnnnnnnnnnnnnnnnnnnnnnnnnnnnnnnnnnnnnnnnnnnnnnnnnnnnnnnnnnnnnnnnnnnnnnnnnnnnnnnnnnnnnnnnnnnnnnnnnnnnnnnnnnnnnnnnnnnnnnnnnnnnnnnnnnnnnnnnnnnnnnnnnnnnnnnnnnnnnnnnnnnnnnnnnnnnnnnnnnnnnnnnnnnnnnnnnnnnnnnnnnnnnnnnnnnnnnnnnnnnnnnnnnnnnnnnnnnnnnnnnnnnnnnnnnnnnnnnnnnnnnnnnnnnnnnnnnnnnnnnnnnnnnnnnnnnnnnnnnnnnnnnnnnnnnnnnnnnnnnnnnnnnnnnnnnnnnnnnnnnnnnnnnnnnnnnnnnnnnnnnnnnnnnnnnnnnnnnnnnnnnnnnnnnnnnnnnnnnnnnnnnnnnnnnnnnnnnnnnnnnnnnnnnnnnnnnnnnnnnnnnnnnnnnnnnnnnnnnnnnnnnnnnnnnnnnnnnnnnnnnnnnnnnnnnnnnnnnnnnnnnnnnnnnnnnnnnnnnnnnnnnnnnnnnnnnnnnnnnnnnnnnnnnnnnnnnnnnnnnnnnnnnnnnnnnnnnnnnnnnnnnnnnnnnnnnnnnnnnnnnnnnnnnnnnnnnnnnnnnnnnnnnnnnnnnnnnnnnnnnnnnnnnnnnnnnnnnnnnnnnnnnnnnnnnnnnnnnnnnnnnnnnnnnnnnnnnnnnnnnnnnnnnnnnnnnnnnnnnnnnnnnnnnnnnnnnnnnnnnnnnnnnnnnnnnnnnnnnnnnnnnnnnnnnnnnnnnnnnnnnnnnnnnnnnnnnnnnnnnnnnnnnnnnnnnnnnnnnnnnnnnnnnnnnnnnnnnnnnnnnnnnnnnnnnnnnnnnnnnnnnnnnnnnnnnnnnnnnnnnnnnnnnnnnnnnnnnnnnnnnnnnnnnnnnnnnnnnnnnnnnnnnnnnnnnnnnnnnnnnnnnnnnnnnnnnnnnnnnnnnnnnnnnnnnnnnnnnnnnnnnnnnnnnnnnnnnnnnnnnnnnnnnnnnnnnnnnnnnnnnnnnnnnnnnnnnnnnnnnnnnnnnnnnnnnnnnnnnnnnnnnnnnnnnnnnnnnnnnnnnnnnnnnnnnnnnnnnnnnnnnnnnnnnnnnnnnnnnnnnnnnnnnnnnnnnnnnnnnnnnnnnnnnnnnnnnnnnnnnnnnnnnnnnnnnnnnnnnnnnnnnnnnnnnnnnnnnnnnnnnnnnnnnnnnnnnnnnnnnnnnnnnnnnnnnnnnnnnnnnnnnnnnnnnnnnnnnnnnnnnnnnnnnnnnnnnnnnnnnnnnnnnnnnnnnnnnnnnnnnnnnnnnnnnnnnnnnnnnnnnnnnnnnnnnnnnnnnnnnnnnnnnnnnnnnnnnnnnnnnnnnnnnnnnnnnnnnnnnnnnnnnnnnnnnnnnnnnnnnnnnnnnnnnnnnnnnnnnnnnnnnnnnnnnnnnnnnnnnnnnnnnnnnnnnnnnnnnnnnnnnnnnnnnnnnnnnnnnnnnnnnnnnnnnnnnnnnnnnnnnnnnnnnnnnnnnnnnnnnnnnnnnnnnnnnnnnnnnnnnnnnnnnnnnnnnnnnnnnnnnnnnnnnnnnnnnnnnnnnnnnnnnnnnnnnnnnnnnnnnnnnnnnnnnnnnnnnnnnnnnnnnnnnnnnnnnnnnnnnnnnnnnnnnnnnnnnnnnnnnnnnnnnnnnnnnnnnnnnnnnnnnnnnnnnnnnnnnnnnnnnnnnnnnnnnnnnnnnnnnnnnnnnnnnnnnnnnnnnnnnnnnnnnnnnnnnnnnnnnnnnnnnnnnnnnnnnnnnnnnnnnnnnnnnnnnnnnnnnnnnnnnnnnnnnnnnnnnnnnnnnnnnnnnnnnnnnnnnnnnnnnnnnnnnnnnnnnnnnnnnnnnnnnnnnnnnnnnnnnnnnnnnnnnnnnnnnnnnnnnnnnnnnnnnnnnnnnnnnnnnnnnnnnnnnnnnnnnnnnnnnnnnnnnnnnnnnnnnnnnnnnnnnnnnnnnnnnnnnnnnnnnnnnnnnnnnnnnnnnnnnnnnnnnnnnnnnnnnnnnnnnnnnnnnnnnnnnnnnnnnnnnnnnnnnnnnnnnnnnnnnnnnnnnnnnnnnnnnnnnnnnnnnnnnnnnnnnnnnnnnnnnnnnnnnnnnnnnnnnnnnnnnnnnnnnnnnnnnnnnnnnnnnnnnnnnnnnnnnnnnnnnnnnnnnnnnnnnnnnnnnnnnnnnnnnnnnnnnnnnnnnnnnnnnnnnnnnnnnnnnnnnnnnnnnnnnnnnnnnnnnnnnnnnnnnnnnnnnnnnnnnnnnnnnnnnnnnnnnnnnnnnnnnnnnnnnnnnnnnnnnnnnnnnnnnnnnnnnnnnnnnnnnnnnnnnnnnnnnnnnnnnnnnnnnnnnnnnnnnnnnnnnnnnnnnnnnnnnnnnnnnnnnnnnnnnnnnnnnnnnnnnnnnnnnnnnnnnnnnnnnnnnnnnnnnnnnnnnnnnnnnnnnnnnnnnnnnnnnnnnnnnnnnnnnnnnnnnnnnnnnnnnnnnnnnnnnnnnnnnnnnnnnnnnnnnnnnnnnnnnnnnnnnnnnnnnnnnnnnnnnnnnnnnnnnnnnnnnnnnnnnnnnnnnnnnnnnnnnnnnnnnnnnnnnnnnnnnnnnnnnnnnnnnnnnnnnnnnnnnnnnnnnnnnnnnnnnnnnnnnnnnnnnnnnnnnnnnnnnnnnnnnnnnnnnnnnnnnnnnnnnnnnnnnnnnnnnnnnnnnnnnnnnnnnnnnnnnnnnnnnnnnnnnnnnnnnnnnnnnnnnnnnnnnnnnnnnnnnnnnnnnnnnnnnnnnnnnnnnnnnnnnnnnnnnnnnnnnnnnnnnnnnnnnnnnnnnnnnnnnnnnnnnnnnnnnnnnnnnnnnnnnnnnnnnnnnnnnnnnnnnnnnnnnnnnnnnnnnnnnnnnnnnnnnnnnnnnnnnnnnnnnnnnnnnnnnnnnnnnnnnnnnnnnnnnnnnnnnnnnnnnnnnnnnnnnnnnnnnnnnnnnnnnnnnnnnnnnnnnnnnnnnnnnnnnnnnnnnnnnnnnnnnnnnnnnnnnnnnnnnnnnnnnnnnnnnnnnnnnnnnnnnnnnnnnnnnnnnnnnnnnnnnnnnnnnnnnnnnnnnnnnnnnnnnnnnnnnnnnnnnnnnnnnnnnnnnnnnnnnnnnnnnnnnnnnnnnnnnnnnnnnnnnnnnnnnnnnnnnnnnnnnnnnnnnnnnnnnnnnnnnnnnnnnnnnnnnnnnnnnnnnnnnnnnnnnnnnnnnnnnnnnnnnnnnnnnnnnnnnnnnnnnnnnnnnnnnnnnnnnnnnnnnnnnnnnnnnnnnnnnnnnnnnnnnnnnnnnnnnnnnnnnnnnnnnnnnnnnnnnnnnnnnnnnnnnnnnnnnnnnnnnnnnnnnnnnnnnnnnnnnnnnnnnnnnnnnnnnnnnnnnnnnnnnnnnnnnnnnnnnnnnnnnnnnnnnnnnnnnnnnnnnnnnnnnnnnnnnnnnnnnnnnnnnnnnnnnnnnnnnnnnnnnnnnnnnnnnnnnnnnnnnnnnnnnnnnnnnnnnnnnnnnnnnnnnnnnnnnnnnnnnnnnnnnnnnnnnnnnnnnnnnnnnnnnnnnnnnnnnnnnnnnnnnnnnnnnnnnnnnnnnnnnnnnnnnnnnnnnnnnnnnnnnnnnnnnnnnnnnnnnnnnnnnnnnnnnnnnnnnnnnnnnnnnnnnnnnnnnnnnnnnnnnnnnnnnnnnnnnnnnnnnnnnnnnnnnnnnnnnnnnnnnnnnnnnnnnnnnnnnnnnnnnnnnnnnnnnnnnnnnnnnnnnnnnnnnnnnnnnnnnnnnnnnnnnnnnnnnnnnnnnnnnnnnnnnnnnnnnnnnnnnnnnnnnnnnnnnnnnnnnnnnnnnnnnnnnnnnnnnnnnnnnnnnnnnnnnnnnnnnnnnnnnnnnnnnnnnnnnnnnnnnnnnnnnnnnnnnnnnnnnnnnnnnnnnnnnnnnnnnnnnnnnnnnnnnnnnnnnnnnnnnnnnnnnnnnnnnnnnnnnnnnnnnnnnnnnnnnnnnnnnnnnnnnnnnnnnnnnnnnnnnnnnnnnnnnnnnnnnnnnnnnnnnnnnnnnnnnnnnnnnnnnnnnnnnnnnnnnnnnnnnnnnnnnnnnnnnnnnnnnnnnnnnnnnnnnnnnnnnnnnnnnnnnnnnnnnnnnnnnnnnnnnnnnnnnnnnnnnnnnnnnnnnnnnnnnnnnnnnnnnnnnnnnnnnnnnnnnnnnnnnnnnnnnnnnnnnnnnnnnnnnnnnnnnnnnnnnnnnnnnnnnnnnnnnnnnnnnnnnnnnnnnnnnnnnnnnnnnnnnnnnnnnnnnnnnnnnnnnnnnnnnnnnnnnnnnnnnnnnnnnnnnnnnnnnnnnnnnnnnnnnnnnnnnnnnnnnnnnnnnnnnnnnnnnnnnnnnnnnnnnnnnnnnnnnnnnnnnnnnnnnnnnnnnnnnnnnnnnnnnnnnnnnnnnnnnnnnnnnnnnnnnnnnnnnnnnnnnnnnnnnnnnnnnnnnnnnnnnnnnnnnnnnnnnnnnnnnnnnnnnnnnnnnnnnnnnnnnnnnnnnnnnnnnnnnnnnnnnnnnnnnnnnnnnnnnnnnnnnnnnnnnnnnnnnnnnnnnnnnnnnnnnnnnnnnnnnnnnnnnnnnnnnnnnnnnnnnnnnnnnnnnnnnnnnnnnnnnnnnnnnnnnnnnnnnnnnnnnnnnnnnnnnnnnnnnnnnnnnnnnnnnnnnnnnnnnnnnnnnnnnnnnnnnnnnnnnnnnnnnnnnnnnnnnnnnnnnnnnnnnnnnnnnnnnnnnnnnnnnnnnnnnnnnnnnnnnnnnnnnnnnnnnnnnnnnnnnnnnnnnnnnnnnnnnnnnnnnnnnnnnnnnnnnnnnnnnnnnnnnnnnnnnnnnnnnnnnnnnnnnnnnnnnnnnnnnnnnnnnnnnnnnnnnnnnnnnnnnnnnnnnnnnnnnnnnnnnnnnnnnnnnnnnnnnnnnnnnnnnnnnnnnnnnnnnnnnnnnnnnnnnnnnnnnnnnnnnnnnnnnnnnnnnnnnnnnnnnnnnnnnnnnnnnnnnnnnnnnnnnnnnnnnnnnnnnnnnnnnnnnnnnnnnnnnnnnnnnnnnnnnnnnnnnnnnnnnnnnnnnnnnnnnnnnnnnnnnnnnnnnnnnnnnnnnnnnnnnnnnnnnnnnnnnnnnnnnnnnnnnnnnnnnnnnnnnnnnnnnnnnnnnnnnnnnnnnnnnnnnnnnnnnnnnnnnnnnnnnnnnnnnnnnnnnnnnnnnnnnnnnnnnnnnnnnnnnnnnnnnnnnnnnnnnnnnnnnnnnnnnnnnnnnnnnnnnnnnnnnnnnnnnnnnnnnnnnnnnnnnnnnnnnnnnnnnnnnnnnnnnnnnnnnnnnnnnnnnnnnnnnnnnnnnnnnnnnnnnnnnnnnnnnnnnnnnnnnnnnnnnnnnnnnnnnnnnnnnnnnnnnnnnnnnnnnnnnnnnnnnnnnnnnnnnnnnnnnnnnnnnnnnnnnnnnnnnnnnnnnnnnnnnnnnnnnnnnnnnnnnnnnnnnnnnnnnnnnnnnnnnnnnnnnnnnnnnnnnnnnnnnnnnnnnnnnnnnnnnnnnnnnnnnnnnnnnnnnnnnnnnnnnnnnnnnnnnnnnnnnnnnnnnnnnnnnnnnnnnnnnnnnnnnnnnnnnnnnnnnnnnnnnnnnnnnnnnnnnnnnnnnnnnnnnnnnnnnnnnnnnnnnnnnnnnnnnnnnnnnnnnnnnnnnnnnnnnnnnnnnnnnnnnnnnnnnnnnnnnnnnnnnnnnnnnnnnnnnnnnnnnnnnnnnnnnnnnnnnnnnnnnnnnnnnnnnnnnnnnnnnnnnnnnnnnnnnnnnnnnnnnnnnnnnnnnnnnnnnnnnnnnnnnnnnnnnnnnnnnnnnnnnnnnnnnnnnnnnnnnnnnnnnnnnnnnnnnnnnnnnnnnnnnnnnnnnnnnnnnnnnnnnnnnnnnnnnnnnnnnnnnnnnnnnnnnnnnnnnnnnnnnnnnnnnnnnnnnnnnnnnnnnnnnnnnnnnnnnnnnnnnnnnnnnnnnnnnnnnnnnnnnnnnnnnnnnnnnnnnnnnnnnnnnnnnnnnnnnnnnnnnnnnnnnnnnnnnnnnnnnnnnnnnnnnnnnnnnnnnnnnnnnnnnnnnnnnnnnnnnnnnnnnnnnnnnnnnnnnnnnnnnnnnnnnnnnnnnnnnnnnnnnnnnnnnnnnnnnnnnnnnnnnnnnnnnnnnnnnnnnnnnnnnnnnnnnnnnnnnnnnnnnnnnnnnnnnnnnnnnnnnnnnnnnnnnnnnnnnnnnnnnnnnnnnnnnnnnnnnnnnnnnnnnnnnnnnnnnnnnnnnnnnnnnnnnnnnnnnnnnnnnnnnnnnnnnnnnnnnnnnnnnnnnnnnnnnnnnnnnnnnnnnnnnnnnnnnnnnnnnnnnnnnnnnnnnnnnnnnnnnnnnnnnnnnnnnnnnnnnnnnnnnnnnnnnnnnnnnnnnnnnnnnnnnnnnnnnnnnnnnnnnnnnnnnnnnnnnnnnnnnnnnnnnnnnnnnnnnnnnnnnnnnnnnnnnnnnnnnnnnnnnnnnnnnnnnnnnnnnnnnnnnnnnnnnnnnnnnnnnnnnnnnnnnnnnnnnnnnnnnnnnnnnnnnnnnnnnnnnnnnnnnnnnnnnnnnnnnnnnnnnnnnnnnnnnnnnnnnnnnnnnnnnnnnnnnnnnnnnnnnnnnnnnnnnnnnnnnnnnnnnnnnnnnnnnnnnnnnnnnnnnnnnnnnnnnnnnnnnnnnnnnnnnnnnnnnnnnnnnnnnnnnnnnnnnnnnnnnnnnnnnnnnnnnnnnnnnnnnnnnnnnnnnnnnnnnnnnnnnnnnnnnnnnnnnnnnnnnnnnnnnnnnnnnnnnnnnnnnnnnnnnnnnnnnnnnnnnnnnnnnnnnnnnnnnnnnnnnnnnnnnnnnnnnnnnnnnnnnnnnnnnnnnnnnnnnnnnnnnnnnnnnnnnnnnnnnnnnnnnnnnnnnnnnnnnnnnnnnnnnnnnnnnnnnnnnnnnnnnnnnnnnnnnnnnnnnnnnnnnnnnnnnnnnnnnnnnnnnnnnnnnnnnnnnnnnnnnnnnnnnnnnnnnnnnnnnnnnnnnnnnnnnnnnnnnnnnnnnnnnnnnnnnnnnnnnnnnnnnnnnnnnnnnnnnnnnnnnnnnnnnnnnnnnnnnnnnnnnnnnnnnnnnnnnnnnnnnnnnnnnnnnnnnnnnnnnnnnnnnnnnnnnnnnnnnnnnnnnnnnnnnnnnnnnnnnnnnnnnnnnnnnnnnnnnnnnnnnnnnnnnnnnnnnnnnnnnnnnnnnnnnnnnnnnnnnnnnnnnnnnnnnnnnnnnnnnnnnnnnnnnnnnnnnnnnnnnnnnnnnnnnnnnnnnnnnnnnnnnnnnnnnnnnnnnnnnnnnnnnnnnnnnnnnnnnnnnnnnnnnnnnnnnnnnnnnnnnnnnnnnnnnnnnnnnnnnnnnnnnnnnnnnnnnnnnnnnnnnnnnnnnnnnnnnnnnnnnnnnnnnnnnnnnnnnnnnnnnnnnnnnnnnnnnnnnnnnnnnnnnnnnnnnnnnnnnnnnnnnnnnnnnnnnnnnnnnnnnnnnnnnnnnnnnnnnnnnnnnnnnnnnnnnnnnnnnnnnnnnnnnnnnnnnnnnnnnnnnnnnnnnnnnnnnnnnnnnnnnnnnnnnnnnnnnnnnnnnnnnnnnnnnnnnnnnnnnnnnnnnnnnnnnnnnnnnnnnnnnnnnnnnnnnnnnnnnnnnnnnnnnnnnnnnnnnnnnnnnnnnnnnnnnnnnnnnnnnnnnnnnnnnnnnnnnnnnnnnnnnnnnnnnnnnnnnnnnnnnnnnnnnnnnnnnnnnnnnnnnnnnnnnnnnnnnnnnnnnnnnnnnnnnnnnnnnnnnnnnnnnnnnnnnnnnnnnnnnnnnnnnnnnnnnnnnnnnnnnnnnnnnnnnnnnnnnnnnnnnnnnnnnnnnnnnnnnnnnnnnnnnnnnnnnnnnnnnnnnnnnnnnnnnnnnnnnnnnnnnnnnnnnnnnnnnnnnnnnnnnnnnnnnnnnnnnnnnnnnnnnnnnnnnnnnnnnnnnnnnnnnnnnnnnnnnnnnnnnnnnnnnnnnnnnnnnnnnnnnnnnnnnnnnnnnnnnnnnnnnnnnnnnnnnnnnnnnnnnnnnnnnnnnnnnnnnnnnnnnnnnnnnnnnnnnnnnnnnnnnnnnnnnnnnnnnnnnnnnnnnnnnnnnnnnnnnnnnnnnnnnnnnnnnnnnnnnnnnnnnnnnnnnnnnnnnnnnnnnnnnnnnnnnnnnnnnnnnnnnnnnnnnnnnnnnnnnnnnnnnnnnnnnnnnnnnnnnnnnnnnnnnnnnnnnnnnnnnnnnnnnnnnnnnnnnnnnnnnnnnnnnnnnnnnnnnnnnnnnnnnnnnnnnnnnnnnnnnnnnnnnnnnnnnnnnnnnnnnnnnnnnnnnnnnnnnnnnnnnnnnnnnnnnnnnnnnnnnnnnnnnnnnnnnnnnnnnnnnnnnnnnnnnnnnnnnnnnnnnnnnnnnnnnnnnnnnnnnnnnnnnnnnnnnnnnnnnnnnnnnnnnnnnnnnnnnnnnnnnnnnnnnnnnnnnnnnnnnnnnnnnnnnnnnnnnnnnnnnnnnnnnnnnnnnnnnnnnnnnnnnnnnnnnnnnnnnnnnnnnnnnnnnnnnnnnnnnnnnnnnnnnnnnnnnnnnnnnnnnnnnnnnnnnnnnnnnnnnnnnnnnnnnnnnnnnnnnnnnnnnnnnnnnnnnnnnnnnnnnnnnnnnnnnnnnnnnnnnnnnnnnnnnnnnnnnnnnnnnnnnnnnnnnnnnnnnnnnnnnnnnnnnnnnnnnnnnnnnnnnnnnnnnnnnnnnnnnnnnnnnnnnnnnnnnnnnnnnnnnnnnnnnnnnnnnnnnnnnnnnnnnnnnnnnnnnnnnnnnnnnnnnnnnnnnnnnnnnnnnnnnnnnnnnnnnnnnnnnnnnnnnnnnnnnnnnnnnnnnnnnnnnnnnnnnnnnnnnnnnnnnnnnnnnnnnnnnnnnnnnnnnnnnnnnnnnnnnnnnnnnnnnnnnnnnnnnnnnnnnnnnnnnnnnnnnnnnnnnnnnnnnnnnnnnnnnnnnnnnnnnnnnnnnnnnnnnnnnnnnnnnnnnnnnnnnnnnnnnnnnnnnnnnnnnnnnnnnnnnnnnnnnnnnnnnnnnnnnnnnnnnnnnnnnnnnnnnnnnnnnnnnnnnnnnnnnnnnnnnnnnnnnnnnnnnnnnnnnnnnnnnnnnnnnnnnnnnnnnnnnnnnnnnnnnnnnnnnnnnnnnnnnnnnnnnnnnnnnnnnnnnnnnnnnnnnnnnnnnnnnnnnnnnnnnnnnnnnnnnnnnnnnnnnnnnnnnnnnnnnnnnnnnnnnnnnnnnnnnnnnnnnnnnnnnnnnnnnnnnnnnnnnnnnnnnnnnnnnnnnnnnnnnnnnnnnnnnnnnnnnnnnnnnnnnnnnnnnnnnnnnnnnnnnnnnnnnnnnnnnnnnnnnnnnnnnnnnnnnnnnnnnnnnnnnnnnnnnnnnnnnnnnnnnnnnnnnnnnnnnnnnnnnnnnnnnnnnnnnnnnnnnnnnnnnnnnnnnnnnnnnnnnnnnnnnnnnnnnnnnnnnnnnnnnnnnnnnnnnnnnnnnnnnnnnnnnnnnnnnnnnnnnnnnnnnnnnnnnnnnnnnnnnnnnnnnnnnnnnnnnnnnnnnnnnnnnnnnnnnnnnnnnnnnnnnnnnnnnnnnnnnnnnnnnnnnnnnnnnnnnnnnnnnnnnnnnnnnnnnnnnnnnnnnnnnnnnnnnnnnnnnnnnnnnnnnnnnnnnnnnnnnnnnnnnnnnnnnnnnnnnnnnnnnnnnnnnnnnnnnnnnnnnnnnnnnnnnnnnnnnnnnnnnnnnnnnnnnnnnnnnnnnnnnnnnnnnnnnnnnnnnnnnnnnnnnnnnnnnnnnnnnnnnnnnnnnnnnnnnnnnnnnnnnnnnnnnnnnnnnnnnnnnnnnnnnnnnnnnnnnnnnnnnnnnnnnnnnnnnnnnnnnnnnnnnnnnnnnnnnnnnnnnnnnnnnnnnnnnnnnnnnnnnnnnnnnnnnnnnnnnnnnnnnnnnnnnnnnnnnnnnnnnnnnnnnnnnnnnnnnnnnnnnnnnnnnnnnnnnnnnnnnnnnnnnnnnnnnnnnnnnnnnnnnnnnnnnnnnnnnnnnnnnnnnnnnnnnnnnnnnnnnnnnnnnnnnnnnnnnnnnnnnnnnnnnnnnnnnnnnnnnnnnnnnnnnnnnnnnnnnnnnnnnnnnnnnnnnnnnnnnnnnnnnnnnnnnnnnnnnnnnnnnnnnnnnnnnnnnnnnnnnnnnnnnnnnnnnnnnnnnnnnnnnnnnnnnnnnnnnnnnnnnnnnnnnnnnnnnnnnnnnnnnnnnnnnnnnnnnnnnnnnnnnnnnnnnnnnnnnnnnnnnnnnnnnnnnnnnnnnnnnnnnnnnnnnnnnnnnnnnnnnnnnnnnnnnnnnnnnnnnnnnnnnnnnnnnnnnnnnnnnnnnnnnnnnnnnnnnnnnnnnnnnnnnnnnnnnnnnnnnnnnnnnnnnnnnnnnnnnnnnnnnnnnnnnnnnnnnnnnnnnnnnnnnnnnnnnnnnnnnnnnnnnnnnnnnnnnnnnnnnnnnnnnnnnnnnnnnnnnnnnnnnnnnnnnnnnnnnnnnnnnnnnnnnnnnnnnnnnnnnnnnnnnnnnnnnnnnnnnnnnnnnnnnnnnnnnnnnnnnnnnnnnnnnnnnnnnnnnnnnnnnnnnnnnnnnnnnnnnnnnnnnnnnnnnnnnnnnnnnnnnnnnnnnnnnnnnnnnnnnnnnnnnnnnnnnnnnnnnnnnnnnnnnnnnnnnnnnnnnnnnnnnnnnnnnnnnnnnnnnnnnnnnnnnnnnnnnnnnnnnnnnnnnnnnnnnnnnnnnnnnnnnnnnnnnnnnnnnnnnnnnnnnnnnnnnnnnnnnnnnnnnnnnnnnnnnnnnnnnnnnnnnnnnnnnnnnnnnnnnnnnnnnnnnnnnnnnnnnnnnnnnnnnnnnnnnnnnnnnnnnnnnnnnnnnnnnnnnnnnnnnnnnnnnnnnnnnnnnnnnnnnnnnnnnnnnnnnnnnnnnnnnnnnnnnnnnnnnnnnnnnnnnnnnnnnnnnnnnnnnnnnnnnnnnnnnnnnnnnnnnnnnnnnnnnnnnnnnnnnnnnnnnnnnnnnnnnnnnnnnnnnnnnnnnnnnnnnnnnnnnnnnnnnnnnnnnnnnnnnnnnnnnnnnnnnnnnnnnnnnnnnnnnnnnnnnnnnnnnnnnnnnnnnnnnnnnnnnnnnnnnnnnnnnnnnnnnnnnnnnnnnnnnnnnnnnnnnnnnnnnnnnnnnnnnnnnnnnnnnnnnnnnnnnnnnnnnnnnnnnnnnnnnnnnnnnnnnnnnnnnnnnnnnnnnnnnnnnnnnnnnnnnnnnnnnnnnnnnnnnnnnnnnnnnnnnnnnnnnnnnnnnnnnnnnnnnnnnnnnnnnnnnnnnnnnnnnnnnnnnnnnnnnnnnnnnnnnnnnnnnnnnnnnnnnnnnnnnnnnnnnnnnnnnnnnnnnnnnnnnnnnnnnnnnnnnnnnnnnnnnnnnnnnnnnnnnnnnnnnnnnnnnnnnnnnnnnnnnnnnnnnnnnnnnnnnnnnnnnnnnnnnnnnnnnnnnnnnnnnnnnnnnnnnnnnnnnnnnnnnnnnnnnnnnnnnnnnnnnnnnnnnnnnnnnnnnnnnnnnnnnnnnnnnnnnnnnnnnnnnnnnnnnnnnnnnnnnnnnnnnnnnnnnnnnnnnnnnnnnnnnnnnnnnnnnnnnnnnnnnnnnnnnnnnnnnnnnnnnnnnnnnnnnnnnnnnnnnnnnnnnnnnnnnnnnnnnnnnnnnnnnnnnnnnnnnnnnnnnnnnnnnnnnnnnnnnnnnnnnnnnnnnnnnnnnnnnnnnnnnnnnnnnnnnnnnnnnnnnnnnnnnnnnnnnnnnnnnnnnnnnnnnnnnnnnnnnnnnnnnnnnnnnnnnnnnnnnnnnnnnnnnnnnnnnnnnnnnnnnnnnnnnnnnnnnnnnnnnnnnnnnnnnnnnnnnnnnnnnnnnnnnnnnnnnnnnnnnnnnnnnnnnnnnnnnnnnnnnnnnnnnnnnnnnnnnnnnnnnnnnnnnnnnnnnnnnnnnnnnnnnnnnnnnnnnnnnnnnnnnnnnnnnnnnnnnnnnnnnnnnnnnnnnnnnnnnnnnnnnnnnnnnnnnnnnnnnnnnnnnnnnnnnnnnnnnnnnnnnnnnnnnnnnnnnnnnnnnnnnnnnnnnnnnnnnnnnnnnnnnnnnnnnnnnnnnnnnnnnnnnnnnnnnnnnnnnnnnnnnnnnnnnnnnnnnnnnnnnnnnnnnnnnnnnnnnnnnnnnnnnnnnnnnnnnnnnnnnnnnnnnnnnnnnnnnnnnnnnnnnnnnnnnnnnnnnnnnnnnnnnnnnnnnnnnnnnnnnnnnnnnnnnnnnnnnnnnnnnnnnnnnnnnnnnnnnnnnnnnnnnnnnnnnnnnnnnnnnnnnnnnnnnnnnnnnnnnnnnnnnnnnnnnnnnnnnnnnnnnnnnnnnnnnnnnnnnnnnnnnnnnnnnnnnnnnnnnnnnnnnnnnnnnnnnnnnnnnnnnnnnnnnnnnnnnnnnnnnnnnnnnnnnnnnnnnnnnnnnnnnnnnnnnnnnnnnnnnnnnnnnnnnnnnnnnnnnnnnnnnnnnnnnnnnnnnnnnnnnnnnnnnnnnnnnnnnnnnnnnnnnnnnnnnnnnnnnnnnnnnnnnnnnnnnnnnnnnnnnnnnnnnnnnnnnnnnnnnnnnnnnnnnnnnnnnnnnnnnnnnnnnnnnnnnnnnnnnnnnnnnnnnnnnnnnnnnnnnnnnnnnnnnnnnnnnnnnnnnnnnnnnnnnnnnnnnnnnnnnnnnnnnnnnnnnnnnnnnnnnnnnnnnnnnnnnnnnnnnnnnnnnnnnnnnnnnnnnnnnnnnnnnnnnnnnnnnnnnnnnnnnnnnnnnnnnnnnnnnnnnnnnnnnnnnnnnnnnnnnnnnnnnnnnnnnnnnnnnnnnnnnnnnnnnnnnnnnnnnnnnnnnnnnnnnnnnnnnnnnnnnnnnnnnnnnnnnnnnnnnnnnnnnnnnnnnnnnnnnnnnnnnnnnnnnnnnnnnnnnnnnnnnnnnnnnnnnnnnnnnnnnnnnnnnnnnnnnnnnnnnnnnnnnnnnnnnnnnnnnnnnnnnnnnnnnnnnnnnnnnnnnnnnnnnnnnnnnnnnnnnnnnnnnnnnnnnnnnnnnnnnnnnnnnnnnnnnnnnnnnnnnnnnnnnnnnnnnnnnnnnnnnnnnnnnnnnnnnnnnnnnnnnnnnnnnnnnnnnnnnnnnnnnnnnnnnnnnnnnnnnnnnnnnnnnnnnnnnnnnnnnnnnnnnnnnnnnnnnnnnnnnnnnnnnnnnnnnnnnnnnnnnnnnnnnnnnnnnnnnnnnnnnnnnnnnnnnnnnnnnnnnnnnnnnnnnnnnnnnnnnnnnnnnnnnnnnnnnnnnnnnnnnnnnnnnnnnnnnnnnnnnnnnnnnnnnnnnnnnnnnnnnnnnnnnnnnnnnnnnnnnnnnnnnnnnnnnnnnnnnnnnnnnnnnnnnnnnnnnnnnnnnnnnnnnnnnnnnnnnnnnnnnnnnnnnnnnnnnnnnnnnnnnnnnnnnnnnnnnnnnnnnnnnnnnnnnnnnnnnnnnnnnnnnnnnnnnnnnnnnnnnnnnnnnnnnnnnnnnnnnnnnnnnnnnnnnnnnnnnnnnnnnnnnnnnnnnnnnnnnnnnnnnnnnnnnnnnnnnnnnnnnnnnnnnnnnnnnnnnnnnnnnnnnnnnnnnnnnnnnnnnnnnnnnnnnnnnnnnnnnnnnnnnnnnnnnnnnnnnnnnnnnnnnnnnnnnnnnnnnnnnnnnnnnnnnnnnnnnnnnnnnnnnnnnnnnnnnnnnnnnnnnnnnnnnnnnnnnnnnnnnnnnnnnnnnnnnnnnnnnnnnnnnnnnnnnnnnnnnnnnnnnnnnnnnnnnnnnnnnnnnnnnnnnnnnnnnnnnnnnnnnnnnnnnnnnnnnnnnnnnnnnnnnnnnnnnnnnnnnnnnnnnnnnnnnnnnnnnnnnnnnnnnnnnnnnnnnnnnnnnnnnnnnnnnnnnnnnnnnnnnnnnnnnnnnnnnnnnnnnnnnnnnnnnnnnnnnnnnnnnnnnnnnnnnnnnnnnnnnnnnnnnnnnnnnnnnnnnnnnnnnnnnnnnnnnnnnnnnnnnnnnnnnnnnnnnnnnnnnnnnnnnnnnnnnnnnnnnnnnnnnnnnnnnnnnnnnnnnnnnnnnnnnnnnnnnnnnnnnnnnnnnnnnnnnnnnnnnnnnnnnnnnnnnnnnnnnnnnnnnnnnnnnnnnnnnnnnnnnnnnnnnnnnnnnnnnnnnnnnnnnnnnnnnnnnnnnnnnnnnnnnnnnnnnnnnnnnnnnnnnnnnnnnnnnnnnnnnnnnnnnnnnnnnnnnnnnnnnnnnnnnnnnnnnnnnnnnnnnnnnnnnnnnnnnnnnnnnnnnnnnnnnnnnnnnnnnnnnnnnnnnnnnnnnnnnnnnnnnnnnnnnnnnnnnnnnnnnnnnnnnnnnnnnnnnnnnnnnnnnnnnnnnnnnnnnnnnnnnnnnnnnnnnnnnnnnnnnnnnnnnnnnnnnnnnnnnnnnnnnnnnnnnnnnnnnnnnnnnnnnnnnnnnnnnnnnnnnnnnnnnnnnnnnnnnnnnnnnnnnnnnnnnnnnnnnnnnnnnnnnnnnnnnnnnnnnnnnnnnnnnnnnnnnnnnnnnnnnnnnnnnnnnnnnnnnnnnnnnnnnnnnnnnnnnnnnnnnnnnnnnnnnnnnnnnnnnnnnnnnnnnnnnnnnnnnnnnnnnnnnnnnnnnnnnnnnnnnnnnnnnnnnnnnnnnnnnnnnnnnnnnnnnnnnnnnnnnnnnnnnnnnnnnnnnnnnnnnnnnnnnnnnnnnnnnnnnnnnnnnnnnnnnnnnnnnnnnnnnnnnnnnnnnnnnnnnnnnnnnnnnnnnnnnnnnnnnnnnnnnnnnnnnnnnnnnnnnnnnnnnnnnnnnnnnnnnnnnnnnnnnnnnnnnnnnnnnnnnnnnnnnnnnnnnnnnnnnnnnnnnnnnnnnnnnnnnnnnnnnnnnnnnnnnnnnnnnnnnnnnnnnnnnnnnnnnnnnnnnnnnnnnnnnnnnnnnnnnnnnnnnnnnnnnnnnnnnnnnnnnnnnnnnnnnnnnnnnnnnnnnnnnnnnnnnnnnnnnnnnnnnnnnnnnnnnnnnnnnnnnnnnnnnnnnnnnnnnnnnnnnnnnnnnnnnnnnnnnnnnnnnnnnnnnnnnnnnnnnnnnnnnnnnnnnnnnnnnnnnnnnnnnnnnnnnnnnnnnnnnnnnnnnnnnnnnnnnnnnnnnnnnnnnnnnnnnnnnnnnnnnnnnnnnnnnnnnnnnnnnnnnnnnnnnnnnnnnnnnnnnnnnnnnnnnnnnnnnnnnnnnnnnnnnnnnnnnnnnnnnnnnnnnnnnnnnnnnnnnnnnnnnnnnnnnnnnnnnnnnnnnnnnnnnnnnnnnnnnnnnnnnnnnnnnnnnnnnnnnnnnnnnnnnnnnnnnnnnnnnnnnnnnnnnnnnnnnnnnnnnnnnnnnnnnnnnnnnnnnnnnnnnnnnnnnnnnnnnnnnnnnnnnnnnnnnnnnnnnnnnnnnnnnnnnnnnnnnnnnnnnnnnnnnnnnnnnnnnnnnnnnnnnnnnnnnnnnnnnnnnnnnnnnnnnnnnnnnnnnnnnnnnnnnnnnnnnnnnnnnnnnnnnnnnnnnnnnnnnnnnnnnnnnnnnnnnnnnnnnnnnnnnnnnnnnnnnnnnnnnnnnnnnnnnnnnnnnnnnnnnnnnnnnnnnnnnnnnnnnnnnnnnnnnnnnnnnnnnnnnnnnnnnnnnnnnnnnnnnnnnnnnnnnnnnnnnnnnnnnnnnnnnnnnnnnnnnnnnnnnnnnnnnnnnnnnnnnnnnnnnnnnnnnnnnnnnnnnnnnnnnnnnnnnnnnnnnnnnnnnnnnnnnnnnnnnnnnnnnnnnnnnnnnnnnnnnnnnnnnnnnnnnnnnnnnnnnnnnnnnnnnnnnnnnnnnnnnnnnnnnnnnnnnnnnnnnnnnnnnnnnnnnnnnnnnnnnnnnnnnnnnnnnnnnnnnnnnnnnnnnnnnnnnnnnnnnnnnnnnnnnnnnnnnnnnnnnnnnnnnnnnnnnnnnnnnnnnnnnnnnnnnnnnnnnnnnnnnnnnnnnnnnnnnnnnnnnnnnnnnnnnnnnnnnnnnnnnnnnnnnnnnnnnnnnnnnnnnnnnnnnnnnnnnnnnnnnnnnnnnnnnnnnnnnnnnnnnnnnnnnnnnnnnnnnnnnnnnnnnnnnnnnnnnnnnnnnnnnnnnnnnnnnnnnnnnnnnnnnnnnnnnnnnnnnnnnnnnnnnnnnnnnnnnnnnnnnnnnnnnnnnnnnnnnnnnnnnnnnnnnnnnnnnnnnnnnnnnnnnnnnnnnnnnnnnnnnnnnnnnnnnnnnnnnnnnnnnnnnnnnnnnnnnnnnnnnnnnnnnnnnnnnnnnnnnnnnnnnnnnnnnnnnnnnnnnnnnnnnnnnnnnnnnnnnnnnnnnnnnnnnnnnnnnnnnnnnnnnnnnnnnnnnnnnnnnnnnnnnnnnnnnnnnnnnnnnnnnnnnnnnnnnnnnnnnnnnnnnnnnnnnnnnnnnnnnnnnnnnnnnnnnnnnnnnnnnnnnnnnnnnnnnnnnnnnnnnnnnnnnnnnnnnnnnnnnnnnnnnnnnnnnnnnnnnnnnnnnnnnnnnnnnnnnnnnnnnnnnnnnnnnnnnnnnnnnnnnnnnnnnnnnnnnnnnnnnnnnnnnnnnnnnnnnnnnnnnnnnnnnnnnnnnnnnnnnnnnnnnnnnnnnnnnnnnnnnnnnnnnnnnnnnnnnnnnnnnnnnnnnnnnnnnnnnnnnnnnnnnnnnnnnnnnnnnnnnnnnnnnnnnnnnnnnnnnnnnnnnnnnnnnnnnnnnnnnnnnnnnnnnnnnnnnnnnnnnnnnnnnnnnnnnnnnnnnnnnnnnnnnnnnnnnnnnnnnnnnnnnnnnnnnnnnnnnnnnnnnnnnnnnnnnnnnnnnnnnnnnnnnnnnnnnnnnnnnnnnnnnnnnnnnnnnnnnnnnnnnnnnnnnnnnnnnnnnnnnnnnnnnnnnnnnnnnnnnnnnnnnnnnnnnnnnnnnnnnnnnnnnnnnnnnnnnnnnnnnnnnnnnnnnnnnnnnnnnnnnnnnnnnnnnnnnnnnnnnnnnnnnnnnnnnnnnnnnnnnnnnnnnnnnnnnnnnnnnnnnnnnnnnnnnnnnnnnnnnnnnnnnnnnnnnnnnnnnnnnnnnnnnnnnnnnnnnnnnnnnnnnnnnnnnnnnnnnnnnnnnnnnnnnnnnnnnnnnnnnnnnnnnnnnnnnnnnnnnnnnnnnnnnnnnnnnnnnnnnnnnnnnnnnnnnnnnnnnnnnnnnnnnnnnnnnnnnnnnnnnnnnnnnnnnnnnnnnnnnnnnnnnnnnnnnnnnnnnnnnnnnnnnnnnnnnnnnnnnnnnnnnnnnnnnnnnnnnnnnnnnnnnnnnnnnnnnnnnnnnnnnnnnnnnnnnnnnnnnnnnnnnnnnnnnnnnnnnnnnnnnnnnnnnnnnnnnnnnnnnnnnnnnnnnnnnnnnnnnnnnnnnnnnnnnnnnnnnnnnnnnnnnnnnnnnnnnnnnnnnnnnnnnnnnnnnnnnnnnnnnnnnnnnnnnnnnnnnnnnnnnnnnnnnnnnnnnnnnnnnnnnnnnnnnnnnnnnnnnnnnnnnnnnnnnnnnnnnnnnnnnnnnnnnnnnnnnnnnnnnnnnnnnnnnnnnnnnnnnnnnnnnnnnnnnnnnnnnnnnnnnnnnnnnnnnnnnnnnnnnnnnnnnnnnnnnnnnnnnnnnnnnnnnnnnnnnnnnnnnnnnnnnnnnnnnnnnnnnnnnnnnnnnnnnnnnnnnnnnnnnnnnnnnnnnnnnnnnnnnnnnnnnnnnnnnnnnnnnnnnnnnnnnnnnnnnnnnnnnnnnnnnnnnnnnnnnnnnnnnnnnnnnnnnnnnnnnnnnnnnnnnnnnnnnnnnnnnnnnnnnnnnnnnnnnnnnnnnnnnnnnnnnnnnnnnnnnnnnnnnnnnnnnnnnnnnnnnnnnnnnnnnnnnnnnnnnnnnnnnnnnnnnnnnnnnnnnnnnnnnnnnnnnnnnnnnnnnnnnnnnnnnnnnnnnnnnnnnnnnnnnnnnnnnnnnnnnnnnnnnnnnnnnnnnnnnnnnnnnnnnnnnnnnnnnnnnnnnnnnnnnnnnnnnnnnnnnnnnnnnnnnnnnnnnnnnnnnnnnnnnnnnnnnnnnnnnnnnnnnnnnnnnnnnnnnnnnnnnnnnnnnnnnnnnnnnnnnnnnnnnnnnnnnnnnnnnnnnnnnnnnnnnnnnnnnnnnnnnnnnnnnnnnnnnnnnnnnnnnnnnnnnnnnnnnnnnnnnnnnnnnnnnnnnnnnnnnnnnnnnnnnnnnnnnnnnnnnnnnnnnnnnnnnnnnnnnnnnnnnnnnnnnnnnnnnnnnnnnnnnnnnnnnnnnnnnnnnnnnnnnnnnnnnnnnnnnnnnnnnnnnnnnnnnnnnnnnnnnnnnnnnnnnnnnnnnnnnnnnnnnnnnnnnnnnnnnnnnnnnnnnnnnnnnnnnnnnnnnnnnnnnnnnnnnnnnnnnnnnnnnnnnnnnnnnnnnnnnnnnnnnnnnnnnnnnnnnnnnnnnnnnnnnnnnnnnnnnnnnnnnnnnnnnnnnnnnnnnnnnnnnnnnnnnnnnnnnnnnnnnnnnnnnnnnnnnnnnnnnnnnnnnnnnnnnnnnnnnnnnnnnnnnnnnnnnnnnnnnnnnnnnnnnnnnnnnnnnnnnnnnnnnnnnnnnnnnnnnnnnnnnnnnnnnnnnnnnnnnnnnnnnnnnnnnnnnnnnnnnnnnnnnnnnnnnnnnnnnnnnnnnnnnnnnnnnnnnnnnnnnnnnnnnnnnnnnnnnnnnnnnnnnnnnnnnnnnnnnnnnnnnnnnnnnnnnnnnnnnnnnnnnnnnnnnnnnnnnnnnnnnnnnnnnnnnnnnnnnnnnnnnnnnnnnnnnnnnnnnnnnnnnnnnnnnnnnnnnnnnnnnnnnnnnnnnnnnnnnnnnnnnnnnnnnnnnnnnnnnnnnnnnnnnnnnnnnnnnnnnnnnnnnnnnnnnnnnnnnnnnnnnnnnnnnnnnnnnnnnnnnnnnnnnnnnnnnnnnnnnnnnnnnnnnnnnnnnnnnnnnnnnnnnnnnnnnnnnnnnnnnnnnnnnnnnnnnnnnnnnnnnnnnnnnnnnnnnnnnnnnnnnnnnnnnnnnnnnnnnnnnnnnnnnnnnnnnnnnnnnnnnnnnnnnnnnnnnnnnnnnnnnnnnnnnnnnnnnnnnnnnnnnnnnnnnnnnnnnnnnnnnnnnnnnnnnnnnnnnnnnnnnnnnnnnnnnnnnnnnnnnnnnnnnnnnnnnnnnnnnnnnnnnnnnnnnnnnnnnnnnnnnnnnnnnnnnnnnnnnnnnnnnnnnnnnnnnnnnnnnnnnnnnnnnnnnnnnnnnnnnnnnnnnnnnnnnnnnnnnnnnnnnnnnnnnnnnnnnnnnnnnnnnnnnnnnnnnnnnnnnnnnnnnnnnnnnnnnnnnnnnnnnnnnnnnnnnnnnnnnnnnnnnnnnnnnnnnnnnnnnnnnnnnnnnnnnnnnnnnnnnnnnnnnnnnnnnnnnnnnnnnnnnnnnnnnnnnnnnnnnnnnnnnnnnnnnnnnnnnnnnnnnnnnnnnnnnnnnnnnnnnnnnnnnnnnnnnnnnnnnnnnnnnnnnnnnnnnnnnnnnnnnnnnnnnnnnnnnnnnnnnnnnnnnnnnnnnnnnnnnnnnnnnnnnnnnnnnnnnnnnnnnnnnnnnnnnnnnnnnnnnnnnnnnnnnnnnnnnnnnnnnnnnnnnnnnnnnnnnnnnnnnnnnnnnnnnnnnnnnnnnnnnnnnnnnnnnnnnnnnnnnnnnnnnnnnnnnnnnnnnnnnnnnnnnnnnnnnnnnnnnnnnnnnnnnnnnnnnnnnnnnnnnnnnnnnnnnnnnnnnnnnnnnnnnnnnnnnnnnnnnnnnnnnnnnnnnnnnnnnnnnnnnnnnnnnnnnnnnnnnnnnnnnnnnnnnnnnnnnnnnnnnnnnnnnnnnnnnnnnnnnnnnnnnnnnnnnnnnnnnnnnnnnnnnnnnnnnnnnnnnnnnnnnnnnnnnnnnnnnnnnnnnnnnnnnnnnnnnnnnnnnnnnnnnnnnnnnnnnnnnnnnnnnnnnnnnnnnnnnnnnnnnnnnnnnnnnnnnnnnnnnnnnnnnnnnnnnnnnnnnnnnnnnnnnnnnnnnnnnnnnnnnnnnnnnnnnnnnnnnnnnnnnnnnnnnnnnnnnnnnnnnnnnnnnnnnnnnnnnnnnnnnnnnnnnnnnnnnnnnnnnnnnnnnnnnnnnnnnnnnnnnnnnnnnnnnnnnnnnnnnnnnnnnnnnnnnnnnnnnnnnnnnnnnnnnnnnnnnnnnnnnnnnnnnnnnnnnnnnnnnnnnnnnnnnnnnnnnnnnnnnnnnnnnnnnnnnnnnnnnnnnnnnnnnnnnnnnnnnnnnnnnnnnnnnnnnnnnnnnnnnnnnnnnnnnnnnnnnnnnnnnnnnnnnnnnnnnnnnnnnnnnnnnnnnnnnnnnnnnnnnnnnnnnnnnnnnnnnnnnnnnnnnnnnnnnnnnnnnnnnnnnnnnnnnnnnnnnnnnnnnnnnnnnnnnnnnnnnnnnnnnnnnnnnnnnnnnnnnnnnnnnnnnnnnnnnnnnnnnnnnnnnnnnnnnnnnnnnnnnnnnnnnnnnnnnnnnnnnnnnnnnnnnnnnnnnnnnnnnnnnnnnnnnnnnnnnnnnnnnnnnnnnnnnnnnnnnnnnnnnnnnnnnnnnnnnnnnnnnnnnnnnnnnnnnnnnnnnnnnnnnnnnnnnnnnnnnnnnnnnnnnnnnnnnnnnnnnnnnnnnnnnnnnnnnnnnnnnnnnnnnnnnnnnnnnnnnnnnnnnnnnnnnnnnnnnnnnnnnnnnnnnnnnnnnnnnnnnnnnnnnnnnnnnnnnnnnnnnnnnnnnnnnnnnnnnnnnnnnnnnnnnnnnnnnnnnnnnnnnnnnnnnnnnnnnnnnnnnnnnnnnnnnnnnnnnnnnnnnnnnnnnnnnnnnnnnnnnnnnnnnnnnnnnnnnnnnnnnnnnnnnnnnnnnnnnnnnnnnnnnnnnnnnnnnnnnnnnnnnnnnnnnnnnnnnnnnnnnnnnnnnnnnnnnnnnnnnnnnnnnnnnnnnnnnnnnnnnnnnnnnnnnnnnnnnnnnnnnnnnnnnnnnnnnnnnnnnnnnnnnnnnnnnnnnnnnnnnnnnnnnnnnnnnnnnnnnnnnnnnnnnnnnnnnnnnnnnnnnnnnnnnnnnnnnnnnnnnnnnnnnnnnnnnnnnnnnnnnnnnnnnnnnnnnnnnnnnnnnnnnnnnnnnnnnnnnnnnnnnnnnnnnnnnnnnnnnnnnnnnnnnnnnnnnnnnnnnnnnnnnnnnnnnnnnnnnnnnnnnnnnnnnnnnnnnnnnnnnnnnnnnnnnnnnnnnnnnnnnnnnnnnnnnnnnnnnnnnnnnnnnnnnnnnnnnnnnnnnnnnnnnnnnnnnnnnnnnnnnnnnnnnnnnnnnnnnnnnnnnnnnnnnnnnnnnnnnnnnnnnnnnnnnnnnnnnnnnnnnnnnnnnnnnnnnnnnnnnnnnnnnnnnnnnnnnnnnnnnnnnnnnnnnnnnnnnnnnnnnnnnnnnnnnnnnnnnnnnnnnnnnnnnnnnnnnnnnnnnnnnnnnnnnnnnnnnnnnnnnnnnnnnnnnnnnnnnnnnnnnnnnnnnnnnnnnnnnnnnnnnnnnnnnnnnnnnnnnnnnnnnnnnnnnnnnnnnnnnnnnnnnnnnnnnnnnnnnnnnnnnnnnnnnnnnnnnnnnnnnnnnnnnnnnnnnnnnnnnnnnnnnnnnnnnnnnnnnnnnnnnnnnnnnnnnnnnnnnnnnnnnnnnnnnnnnnnnnnnnnnnnnnnnnnnnnnnnnnnnnnnnnnnnnnnnnnnnnnnnnnnnnnnnnnnnnnnnnnnnnnnnnnnnnnnnnnnnnnnnnnnnnnnnnnnnnnnnnnnnnnnnnnnnnnnnnnnnnnnnnnnnnnnnnnnnnnnnnnnnnnnnnnnnnnnnnnnnnnnnnnnnnnnnnnnnnnnnnnnnnnnnnnnnnnnnnnnnnnnnnnnnnnnnnnnnnnnnnnnnnnnnnnnnnnnnnnnnnnnnnnnnnnnnnnnnnnnnnnnnnnnnnnnnnnnnnnnnnnnnnnnnnnnnnnnnnnnnnnnnnnnnnnnnnnnnnnnnnnnnnnnnnnnnnnnnnnnnnnnnnnnnnnnnnnnnnnnnnnnnnnnnnnnnnnnnnnnnnnnnnnnnnnnnnnnnnnnnnnnnnnnnnnnnnnnnnnnnnnnnnnnnnnnnnnnnnnnnnnnnnnnnnnnnnnnnnnnnnnnnnnnnnnnnnnnnnnnnnnnnnnnnnnnnnnnnnnnnnnnnnnnnnnnnnnnnnnnnnnnnnnnnnnnnnnnnnnnnnnnnnnnnnnnnnnnnnnnnnnnnnnnnnnnnnnnnnnnnnnnnnnnnnnnnnnnnnnnnnnnnnnnnnnnnnnnnnnnnnnnnnnnnnnnnnnnnnnnnnnnnnnnnnnnnnnnnnnnnnnnnnnnnnnnnnnnnnnnnnnnnnnnnnnnnnnnnnnnnnnnnnnnnnnnnnnnnnnnnnnnnnnnnnnnnnnnnnnnnnnnnnnnnnnnnnnnnnnnnnnnnnnnnnnnnnnnnnnnnnnnnnnnnnnnnnnnnnnnnnnnnnnnnnnnnnnnnnnnnnnnnnnnnnnnnnnnnnnnnnnnnnnnnnnnnnnnnnnnnnnnnnnnnnnnnnnnnnnnnnnnnnnnnnnnnnnnnnnnnnnnnnnnnnnnnnnnnnnnnnnnnnnnnnnnnnnnnnnnnnnnnnnnnnnnnnnnnnnnnnnnnnnnnnnnnnnnnnnnnnnnnnnnnnnnnnnnnnnnnnnnnnnnnnnnnnnnnnnnnnnnnnnnnnnnnnnnnnnnnnnnnnnnnnnnnnnnnnnnnnnnnnnnnnnnnnnnnnnnnnnnnnnnnnnnnnnnnnnnnnnnnnnnnnnnnnnnnnnnnnnnnnnnnnnnnnnnnnnnnnnnnnnnnnnnnnnnnnnnnnnnnnnnnnnnnnnnnnnnnnnnnnnnnnnnnnnnnnnnnnnnnnnnnnnnnnnnnnnnnnnnnnnnnnnnnnnnnnnnnnnnnnnnnnnnnnnnnnnnnnnnnnnnnnnnnnnnnnnnnnnnnnnnnnnnnnnnnnnnnnnnnnnnnnnnnnnnnnnnnnnnnnnnnnnnnnnnnnnnnnnnnnnnnnnnnnnnnnnnnnnnnnnnnnnnnnnnnnnnnnnnnnnnnnnnnnnnnnnnnnnnnnnnnnnnnnnnnnnnnnnnnnnnnnnnnnnnnnnnnnnnnnnnnnnnnnnnnnnnnnnnnnnnnnnnnnnnnnnnnnnnnnnnnnnnnnnnnnnnnnnnnnnnnnnnnnnnnnnnnnnnnnnnnnnnnnnnnnnnnnnnnnnnnnnnnnnnnnnnnnnnnnnnnnnnnnnnnnnnnnnnnnnnnnnnnnnnnnnnnnnnnnnnnnnnnnnnnnnnnnnnnnnnnnnnnnnnnnnnnnnnnnnnnnnnnnnnnnnnnnnnnnnnnnnnnnnnnnnnnnnnnnnnnnnnnnnnnnnnnnnnnnnnnnnnnnnnnnnnnnnnnnnnnnnnnnnnnnnnnnnnnnnnnnnnnnnnnnnnnnnnnnnnnnnnnnnnnnnnnnnnnnnnnnnnnnnnnnnnnnnnnnnnnnnnnnnnnnnnnnnnnnnnnnnnnnnnnnnnnnnnnnnnnnnnnnnnnnnnnnnnnnnnnnnnnnnnnnnnnnnnnnnnnnnnnnnnnnnnnnnnnnnnnnnnnnnnnnnnnnnnnnnnnnnnnnnnnnnnnnnnnnnnnnnnnnnnnnnnnnnnnnnnnnnnnnnnnnnnnnnnnnnnnnnnnnnnnnnnnnnnnnnnnnnnnnnnnnnnnnnnnnnnnnnnnnnnnnnnnnnnnnnnnnnnnnnnnnnnnnnnnnnnnnnnnnnnnnnnnnnnnnnnnnnnnnnnnnnnnnnnnnnnnnnnnnnnnnnnnnnnnnnnnnnnnnnnnnnnnnnnnnnnnnnnnnnnnnnnnnnnnnnnnnnnnnnnnnnnnnnnnnnnnnnnnnnnnnnnnnnnnnnnnnnnnnnnnnnnnnnnnnnnnnnnnnnnnnnnnnnnnnnnnnnnnnnnnnnnnnnnnnnnnnnnnnnnnnnnnnnnnnnnnnnnnnnnnnnnnnnnnnnnnnnnnnnnnnnnnnnnnnnnnnnnnnnnnnnnnnnnnnnnnnnnnnnnnnnnnnnnnnnnnnnnnnnnnnnnnnnnnnnnnnnnnnnnnnnnnnnnnnnnnnnnnnnnnnnnnnnnnnnnnnnnnnnnnnnnnnnnnnnnnnnnnnnnnnnnnnnnnnnnnnnnnnnnnnnnnnnnnnnnnnnnnnnnnnnnnnnnnnnnnnnnnnnnnnnnnnnnnnnnnnnnnnnnnnnnnnnnnnnnnnnnnnnnnnnnnnnnnnnnnnnnnnnnnnnnnnnnnnnnnnnnnnnnnnnnnnnnnnnnnnnnnnnnnnnnnnnnnnnnnnnnnnnnnnnnnnnnnnnnnnnnnnnnnnnnnnnnnnnnnnnnnnnnnnnnnnnnnnnnnnnnnnnnnnnnnnnnnnnnnnnnnnnnnnnnnnnnnnnnnnnnnnnnnnnnnnnnnnnnnnnnnnnnnnnnnnnnnnnnnnnnnnnnnnnnnnnnnnnnnnnnnnnnnnnnnnnnnnnnnnnnnnnnnnnnnnnnnnnnnnnnnnnnnnnnnnnnnnnnnnnnnnnnnnnnnnnnnnnnnnnnnnnnnnnnnnnnnnnnnnnnnnnnnnnnnnnnnnnnnnnnnnnnnnnnnnnnnnnnnnnnnnnnnnnnnnnnnnnnnnnnnnnnnnnnnnnnnnnnnnnnnnnnnnnnnnnnnnnnnnnnnnnnnnnnnnnnnnnnnnnnnnnnnnnnnnnnnnnnnnnnnnnnnnnnnnnnnnnnnnnnnnnnnnnnnnnnnnnnnnnnnnnnnnnnnnnnnnnnnnnnnnnnnnnnnnnnnnnnnnnnnnnnnnnnnnnnnnnnnnnnnnnnnnnnnnnnnnnnnnnnnnnnnnnnnnnnnnnnnnnnnnnnnnnnnnnnnnnnnnnnnnnnnnnnnnnnnnnnnnnnnnnnnnnnnnnnnnnnnnnnnnnnnnnnnnnnnnnnnnnnnnnnnnnnnnnnnnnnnnnnnnnnnnnnnnnnnnnnnnnnnnnnnnnnnnnnnnnnnnnnnnnnnnnnnnnnnnnnnnnnnnnnnnnnnnnnnnnnnnnnnnnnnnnnnnnnnnnnnnnnnnnnnnnnnnnnnnnnnnnnnnnnnnnnnnnnnnnnnnnnnnnnnnnnnnnnnnnnnnnnnnnnnnnnnnnnnnnnnnnnnnnnnnnnnnnnnnnnnnnnnnnnnnnnnnnnnnnnnnnnnnnnnnnnnnnnnnnnnnnnnnnnnnnnnnnnnnnnnnnnnnnnnnnnnnnnnnnnnnnnnnnnnnnnnnnnnnnnnnnnnnnnnnnnnnnnnnnnnnnnnnnnnnnnnnnnnnnnnnnnnnnnnnnnnnnnnnnnnnnnnnnnnnnnnnnnnnnnnnnnnnnnnnnnnnnnnnnnnnnnnnnnnnnnnnnnnnnnnnnnnnnnnnnnnnnnnnnnnnnnnnnnnnnnnnnnnnnnnnnnnnnnnnnnnnnnnnnnnnnnnnnnnnnnnnnnnnnnnnnnnnnnnnnnnnnnnnnnnnnnnnnnnnnnnnnnnnnnnnnnnnnnnnnnnnnnnnnnnnnnnnnnnnnnnnnnnnnnnnnnnnnnnnnnnnnnnnnnnnnnnnnnnnnnnnnnnnnnnnnnnnnnnnnnnnnnnnnnnnnnnnnnnnnnnnnnnnnnnnnnnnnnnnnnnnnnnnnnnnnnnnnnnnnnnnnnnnnnnnnnnnnnnnnnnnnnnnnnnnnnnnnnnnnnnnnnnnnnnnnnnnnnnnnnnnnnnnnnnnnnnnnnnnnnnnnnnnnnnnnnnnnnnnnnnnnnnnnnnnnnnnnnnnnnnnnnnnnnnnnnnnnnnnnnnnnnnnnnnnnnnnnnnnnnnnnnnnnnnnnnnnnnnnnnnnnnnnnnnnnnnnnnnnnnnnnnnnnnnnnnnnnnnnnnnnnnnnnnnnnnnnnnnnnnnnnnnnnnnnnnnnnnnnnnnnnnnnnnnnnnnnnnnnnnnnnnnnnnnnnnnnnnnnnnnnnnnnnnnnnnnnnnnnnnnnnnnnnnnnnnnnnnnnnnnnnnnnnnnnnnnnnnnnnnnnnnnnnnnnnnnnnnnnnnnnnnnnnnnnnnnnnnnnnnnnnnnnnnnnnnnnnnnnnnnnnnnnnnnnnnnnnnnnnnnnnnnnnnnnnnnnnnnnnnnnnnnnnnnnnnnnnnnnnnnnnnnnnnnnnnnnnnnnnnnnnnnnnnnnnnnnnnnnnnnnnnnnnnnnnnnnnnnnnnnnnnnnnnnnnnnnnnnnnnnnnnnnnnnnnnnnnnnnnnnnnnnnnnnnnnnnnnnnnnnnnnnnnnnnnnnnnnnnnnnnnnnnnnnnnnnnnnnnnnnnnnnnnnnnnnnnnnnnnnnnnnnnnnnnnnnnnnnnnnnnnnnnnnnnnnnnnnnnnnnnnnnnnnnnnnnnnnnnnnnnnnnnnnnnnnnnnnnnnnnnnnnnnnnnnnnnnnnnnnnnnnnnnnnnnnnnnnnnnnnnnnnnnnnnnnnnnnnnnnnnnnnnnnnnnnnnnnnnnnnnnnnnnnnnnnnnnnnnnnnnnnnnnnnnnnnnnnnnnnnnnnnnnnnnnnnnnnnnnnnnnnnnnnnnnnnnnnnnnnnnnnnnnnnnnnnnnnnnnnnnnnnnnnnnnnnnnnnnnnnnnnnnnnnnnnnnnnnnnnnnnnnnnnnnnnnnnnnnnnnnnnnnnnnnnnnnnnnnnnnnnnnnnnnnnnnnnnnnnnnnnnnnnnnnnnnnnnnnnnnnnnnnnnnnnnnnnnnnnnnnnnnnnnnnnnnnnnnnnnnnnnnnnnnnnnnnnnnnnnnnnnnnnnnnnnnnnnnnnnnnnnnnnnnnnnnnnnnnnnnnnnnnnnnnnnnnnnnnnnnnnnnnnnnnnnnnnnnnnnnnnnnnnnnnnnnnnnnnnnnnnnnnnnnnnnnnnnnnnnnnnnnnnnnnnnnnnnnnnnnnnnnnnnnnnnnnnnnnnnnnnnnnnnnnnnnnnnnnnnnnnnnnnnnnnnnnnnnnnnnnnnnnnnnnnnnnnnnnnnnnnnnnnnnnnnnnnnnnnnnnnnnnnnnnnnnnnnnnnnnnnnnnnnnnnnnnnnnnnnnnnnnnnnnnnnnnnnnnnnnnnnnnnnnnnnnnnnnnnnnnnnnnnnnnnnnnnnnnnnnnnnnnnnnnnnnnnnnnnnnnnnnnnnnnnnnnnnnnnnnnnnnnnnnnnnnnnnnnnnnnnnnnnnnnnnnnnnnnnnnnnnnnnnnnnnnnnnnnnnnnnnnnnnnnnnnnnnnnnnnnnnnnnnnnnnnnnnnnnnnnnnnnnnnnnnnnnnnnnnnnnnnnnnnnnnnnnnnnnnnnnnnnnnnnnnnnnnnnnnnnnnnnnnnnnnnnnnnnnnnnnnnnnnnnnnnnnnnnnnnnnnnnnnnnnnnnnnnnnnnnnnnnnnnnnnnnnnnnnnnnnnnnnnnnnnnnnnnnnnnnnnnnnnnnnnnnnnnnnnnnnnnnnnnnnnnnnnnnnnnnnnnnnnnnnnnnnnnnnnnnnnnnnnnnnnnnnnnnnnnnnnnnnnnnnnnnnnnnnnnnnnnnnnnnnnnnnnnnnnnnnnnnnnnnnnnnnnnnnnnnnnnnnnnnnnnnnnnnnnnnnnnnnnnnnnnnnnnnnnnnnnnnnnnnnnnnnnnnnnnnnnnnnnnnnnnnnnnnnnnnnnnnnnnnnnnnnnnnnnnnnnnnnnnnnnnnnnnnnnnnnnnnnnnnnnnnnnnnnnnnnnnnnnnnnnnnnnnnnnnnnnnnnnnnnnnnnnnnnnnnnnnnnnnnnnnnnnnnnnnnnnnnnnnnnnnnnnnnnnnnnnnnnnnnnnnnnnnnnnnnnnnnnnnnnnnnnnnnnnnnnnnnnnnnnnnnnnnnnnnnnnnnnnnnnnnnnnnnnnnnnnnnnnnnnnnnnnnnnnnnnnnnnnnnnnnnnnnnnnnnnnnnnnnnnnnnnnnnnnnnnnnnnnnnnnnnnnnnnnnnnnnnnnnnnnnnnnnnnnnnnnnnnnnnnnnnnnnnnnnnnnnnnnnnnnnnnnnnnnnnnnnnnnnnnnnnnnnnnnnnnnnnnnnnnnnnnnnnnnnnnnnnnnnnnnnnnnnnnnnnnnnnnnnnnnnnnnnnnnnnnnnnnnnnnnnnnnnnnnnnnnnnnnnnnnnnnnnnnnnnnnnnnnnnnnnnnnnnnnnnnnnnnnnnnnnnnnnnnnnnnnnnnnnnnnnnnnnnnnnnnnnnnnnnnnnnnnnnnnnnnnnnnnnnnnnnnnnnnnnnnnnnnnnnnnnnnnnnnnnnnnnnnnnnnnnnnnnnnnnnnnnnnnnnnnnnnnnnnnnnnnnnnnnnnnnnnnnnnnnnnnnnnnnnnnnnnnnnnnnnnnnnnnnnnnnnnnnnnnnnnnnnnnnnnnnnnnnnnnnnnnnnnnnnnnnnnnnnnnnnnnnnnnnnnnnnnnnnnnnnnnnnnnnnnnnnnnnnnnnnnnnnnnnnnnnnnnnnnnnnnnnnnnnnnnnnnnnnnnnnnnnnnnnnnnnnnnnnnnnnnnnnnnnnnnnnnnnnnnnnnnnnnnnnnnnnnnnnnnnnnnnnnnnnnnnnnnnnnnnnnnnnnnnnnnnnnnnnnnnnnnnnnnnnnnnnnnnnnnnnnnnnnnnnnnnnnnnnnnnnnnnnnnnnnnnnnnnnnnnnnnnnnnnnnnnnnnnnnnnnnnnnnnnnnnnnnnnnnnnnnnnnnnnnnnnnnnnnnnnnnnnnnnnnnnnnnnnnnnnnnnnnnnnnnnnnnnnnnnnnnnnnnnnnnnnnnnnnnnnnnnnnnnnnnnnnnnnnnnnnnnnnnnnnnnnnnnnnnnnnnnnnnnnnnnnnnnnnnnnnnnnnnnnnnnnnnnnnnnnnnnnnnnnnnnnnnnnnnnnnnnnnnnnnnnnnnnnnnnnnnnnnnnnnnnnnnnnnnnnnnnnnnnnnnnnnnnnnnnnnnnnnnnnnnnnnnnnnnnnnnnnnnnnnnnnnnnnnnnnnnnnnnnnnnnnnnnnnnnnnnnnnnnnnnnnnnnnnnnnnnnnnnnnnnnnnnnnnnnnnnnnnnnnnnnnnnnnnnnnnnnnnnnnnnnnnnnnnnnnnnnnnnnnnnnnnnnnnnnnnnnnnnnnnnnnnnnnnnnnnnnnnnnnnnnnnnnnnnnnnnnnnnnnnnnnnnnnnnnnnnnnnnnnnnnnnnnnnnnnnnnnnnnnnnnnnnnnnnnnnnnnnnnnnnnnnnnnnnnnnnnnnnnnnnnnnnnnnnnnnnnnnnnnnnnnnnnnnnnnnnnnnnnnnnnnnnnnnnnnnnnnnnnnnnnnnnnnnnnnnnnnnnnnnnnnnnnnnnnnnnnnnnnnnnnnnnnnnnnnnnnnnnnnnnnnnnnnnnnnnnnnnnnnnnnnnnnnnnnnnnnnnnnnnnnnnnnnnnnnnnnnnnnnnnnnnnnnnnnnnnnnnnnnnnnnnnnnnnnnnnnnnnnnnnnnnnnnnnnnnnnnnnnnnnnnnnnnnnnnnnnnnnnnnnnnnnnnnnnnnnnnnnnnnnnnnnnnnnnnnnnnnnnnnnnnnnnnnnnnnnnnnnnnnnnnnnnnnnnnnnnnnnnnnnnnnnnnnnnnnnnnnnnnnnnnnnnnnnnnnnnnnnnnnnnnnnnnnnnnnnnnnnnnnnnnnnnnnnnnnnnnnnnnnnnnnnnnnnnnnnnnnnnnnnnnnnnnnnnnnnnnnnnnnnnnnnnnnnnnnnnnnnnnnnnnnnnnnnnnnnnnnnnnnnnnnnnnnnnnnnnnnnnnnnnnnnnnnnnnnnnnnnnnnnnnnnnnnnnnnnnnnnnnnnnnnnnnnnnnnnnnnnnnnnnnnnnnnnnnnnnnnnnnnnnnnnnnnnnnnnnnnnnnnnnnnnnnnnnnnnnnnnnnnnnnnnnnnnnnnnnnnnnnnnnnnnnnnnnnnnnnnnnnnnnnnnnnnnnnnnnnnnnnnnnnnnnnnnnnnnnnnnnnnnnnnnnnnnnnnnnnnnnnnnnnnnnnnnnnnnnnnnnnnnnnnnnnnnnnnnnnnnnnnnnnnnnnnnnnnnnnnnnnnnnnnnnnnnnnnnnnnnnnnnnnnnnnnnnnnnnnnnnnnnnnnnnnnnnnnnnnnnnnnnnnnnnnnnnnnnnnnnnnnnnnnnnnnnnnnnnnnnnnnnnnnnnnnnnnnnnnnnnnnnnnnnnnnnnnnnnnnnnnnnnnnnnnnnnnnnnnnnnnnnnnnnnnnnnnnnnnnnnnnnnnnnnnnnnnnnnnnnnnnnnnnnnnnnnnnnnnnnnnnnnnnnnnnnnnnnnnnnnnnnnnnnnnnnnnnnnnnnnnnnnnnnnnnnnnnnnnnnnnnnnnnnnnnnnnnnnnnnnnnnnnnnnnnnnnnnnnnnnnnnnnnnnnnnnnnnnnnnnnnnnnnnnnnnnnnnnnnnnnnnnnnnnnnnnnnnnnnnnnnnnnnnnnnnnnnnnnnnnnnnnnnnnnnnnnnnnnnnnnnnnnnnnnnnnnnnnnnnnnnnnnnnnnnnnnnnnnnnnnnnnnnnnnnnnnnnnnnnnnnnnnnnnnnnnnnnnnnnnnnnnnnnnnnnnnnnnnnnnnnnnnnnnnnnnnnnnnnnnnnnnnnnnnnnnnnnnnnnnnnnnnnnnnnnnnnnnnnnnnnnnnnnnnnnnnnnnnnnnnnnnnnnnnnnnnnnnnnnnnnnnnnnnnnnnnnnnnnnnnnnnnnnnnnnnnnnnnnnnnnnnnnnnnnnnnnnnnnnnnnnnnnnnnnnnnnnnnnnnnnnnnnnnnnnnnnnnnnnnnnnnnnnnnnnnnnnnnnnnnnnnnnnnnnnnnnnnnnnnnnnnnnnnnnnnnnnnnnnnnnnnnnnnnnnnnnnnnnnnnnnnnnnnnnnnnnnnnnnnnnnnnnnnnnnnnnnnnnnnnnnnnnnnnnnnnnnnnnnnnnnnnnnnnnnnnnnnnnnnnnnnnnnnnnnnnnnnnnnnnnnnnnnnnnnnnnnnnnnnnnnnnnnnnnnnnnnnnnnnnnnnnnnnnnnnnnnnnnnnnnnnnnnnnnnnnnnnnnnnnnnnnnnnnnnnnnnnnnnnnnnnnnnnnnnnnnnnnnnnnnnnnnnnnnnnnnnnnnnnnnnnnnnnnnnnnnnnnnnnnnnnnnnnnnnnnnnnnnnnnnnnnnnnnnnnnnnnnnnnnnnnnnnnnnnnnnnnnnnnnnnnnnnnnnnnnnnnnnnnnnnnnnnnnnnnnnnnnnnnnnnnnnnnnnnnnnnnnnnnnnnnnnnnnnnnnnnnnnnnnnnnnnnnnnnnnnnnnnnnnnnnnnnnnnnnnnnnnnnnnnnnnnnnnnnnnnnnnnnnnnnnnnnnnnnnnnnnnnnnnnnnnnnnnnnnnnnnnnnnnnnnnnnnnnnnnnnnnnnnnnnnnnnnnnnnnnnnnnnnnnnnnnnnnnnnnnnnnnnnnnnnnnnnnnnnnnnnnnnnnnnnnnnnnnnnnnnnnnnnnnnnnnnnnnnnnnnnnnnnnnnnnnnnnnnnnnnnnnnnnnnnnnnnnnnnnnnnnnnnnnnnnnnnnnnnnnnnnnnnnnnnnnnnnnnnnnnnnnnnnnnnnnnnnnnnnnnnnnnnnnnnnnnnnnnnnnnnnnnnnnnnnnnnnnnnnnnnnnnnnnnnnnnnnnnnnnnnnnnnnnnnnnnnnnnnnnnnnnnnnnnnnnnnnnnnnnnnnnnnnnnnnnnnnnnnnnnnnnnnnnnnnnnnnnnnnnnnnnnnnnnnnnnnnnnnnnnnnnnnnnnnnnnnnnnnnnnnnnnnnnnnnnnnnnnnnnnnnnnnnnnnnnnnnnnnnnnnnnnnnnnnnnnnnnnnnnnnnnnnnnnnnnnnnnnnnnnnnnnnnnnnnnnnnnnnnnnnnnnnnnnnnnnnnnnnnnnnnnnnnnnnnnnnnnnnnnnnnnnnnnnnnnnnnnnnnnnnnnnnnnnnnnnnnnnnnnnnnnnnnnnnnnnnnnnnnnnnnnnnnnnnnnnnnnnnnnnnnnnnnnnnnnnnnnnnnnnnnnnnnnnnnnnnnnnnnnnnnnnnnnnnnnnnnnnnnnnnnnnnnnnnnnnnnnnnnnnnnnnnnnnnnnnnnnnnnnnnnnnnnnnnnnnnnnnnnnnnnnnnnnnnnnnnnnnnnnnnnnnnnnnnnnnnnnnnnnnnnnnnnnnnnnnnnnnnnnnnnnnnnnnnnnnnnnnnnnnnnnnnnnnnnnnnnnnnnnnnnnnnnnnnnnnnnnnnnnnnnnnnnnnnnnnnnnnnnnnnnnnnnnnnnnnnnnnnnnnnnnnnnnnnnnnnnnnnnnnnnnnnnnnnnnnnnnnnnnnnnnnnnnnnnnnnnnnnnnnnnnnnnnnnnnnnnnnnnnnnnnnnnnnnnnnnnnnnnnnnnnnnnnnnnnnnnnnnnnnnnnnnnnnnnnnnnnnnnnnnnnnnnnnnnnnnnnnnnnnnnnnnnnnnnnnnnnnnnnnnnnnnnnnnnnnnnnnnnnnnnnnnnnnnnnnnnnnnnnnnnnnnnnnnnnnnnnnnnnnnnnnnnnnnnnnnnnnnnnnnnnnnnnnnnnnnnnnnnnnnnnnnnnnnnnnnnnnnnnnnnnnnnnnnnnnnnnnnnnnnnnnnnnnnnnnnnnnnnnnnnnnnnnnnnnnnnnnnnnnnnnnnnnnnnnnnnnnnnnnnnnnnnnnnnnnnnnnnnnnnnnnnnnnnnnnnnnnnnnnnnnnnnnnnnnnnnnnnnnnnnnnnnnnnnnnnnnnnnnnnnnnnnnnnnntgcgggacgtccttcttggccttgggcttcggagcgtccttcttggccgcctttgcggcgttcggctttgcggccttcttcgcggtggtcttcgtggtagccatctgtcgttccctttcatcttgggttttcgttcagcatcgcggccatcgcgatgccagccgacagacagttacctcgggtctacgaaaagctcaagcgaaatgtgggtggcatcccaagattttctcaccgctgtacataaagaactttttgggacggggatacttctggcaatattacttttcaactacaataacttactgcctaatggggggttcgtaatacagatttattccgagggcattcacatggtcacggagttcaaccttgttgtagaaaactggattccggttctttatgccgatgggaattggtgccgcgtaggcattcgtaaggcgttggaagacgcccatcttatccgccaaatcgcggctagcaatccgatggacaacatcgccttgctgcgattcctgctggcgattctctattggtgccgaggcaacccgcccaacaacatgcctcaaggccggttcccgccggaatggttccagatactagacgaccacaaggattgcttcaacttgctgggagaaggaaagcggttctatcaggacaaatcgttggagaacaagaaagtccggccaatcgcggacctactggtggagtttcccggcgcggattcagtgaaccacatgcggcatgtcatacatgatggctcttatggattatgcccggcgtgctgtgcaatgggaattctgcggttgtcggtctgggcgtcgaccaacgggtcctatcccgcatcggtcaaccctgggtctgcggcctatgcgtttgttcaagttggcaatctttttctgacactcaagagttatctaacggaagcaggtattgaatcagaagatgttccgtggttatcggataaagagcctaaatcaccgtgcgtcatagccagacttgcatggcgaccacgaagtatgtggctcaatgacccaatagaaaaaagcctctgcgcctactgcggttgtaaaagtgttctgattacgagtctgtacaacggaggtggctggaaaacgtcaaaaccggaagacagcaagaagaagttctggaattccgatcctcatctgttgaaagacgaggaaccaatatcacttccgctcttgaaaacgaatattgcattgcactcttcacaattctggcgggaagctttgtgcttgcgttccgaacaagccggcaaggtggtagcgattggtcctgtggtcaacaagttcacgtttcaagacgccgtgtccatcgaacttcccgatgcctccgccataacgcgggccaatctttccagtgattgcagcagtcaattgcccaaccggctgatacgggtgctcccaaatcccgaccttaaacatcctgaaatcacaacggctgcgataacgcatagaccaaatgccgaggcgcggattcgcgcggcactgaacaacccgaccgacggcgccgacgacaaacagttcttacgcgacatctatgaaccgatggtcgagtcgattatggcctcgaccactgtcggctcgccgctgcggaggcgcgaggcactgcttaagggcaaagcggcgctaaaccgagccatcgagcgagcaatacaaaatcaagcccaagccaatgccgccgacgccccggcgtccacgggcaaaaagaaacgcactaccagaaagtcacgccaggagaccgattcatgagcaccatctctttcatcgagcgactggaaaacgaccggctattcggccccggcgagcgggctaggctgcggacgcttgccgggcgcggcctggacgaatcagtgcccggcttcgatctgtttgccggcctttggtggccgctgcggcaaaaaagtccaaaggccccgcgacgcgaagtggcatggcttgtagccaagctctacgcgaaattccccttgccacaggtggatcaggaaaacgctcggttgccggccgttcttggccgccgcgagccgcgcgacgagcacggtcgcccgcgataccgccggcggttcgatgccctgttgtgtgcgccgctttcggcaatcgaaccgcacttgcgttgggggctatctgttgtgcaggaggaagtcaactccggttgcctgtccggattcgactgggtaacgttgaccgatgatctttccatctgggaccgcgggtccgagcatcgcctgaaacgtgacattcgggacatttgggcggaagtatatctgaacaacaccaacctttcacaataaggagctttgccatgttaatcgaaatccatatgatccagaaccacagcccggccaatctgaaccgcgacgacctgggcgcaccgaagacctgctattttggcggcgtgctgcgttcgcgcatctccagccagtgcatcaaacgcagtatccgcatgagcgaggagttcagaaaactgctcggtggcattcgcaccaggcaattggccaggctaattgccgagaagattgacggcggtgacaccatgcgcaaatgggtcgaggagattcttaatctttgtggtttcaagtctaaggaagccaagaatgccaaatctgatgatgatcaaaccaccgagcaatcggaggataggagcaagatgcttgtgtatatggcgcgcgagggcattgaaagcatagccacgattctgaagaaatctaatgggagtgagaagaactctaaggagagtaacaagaatatcgcaaaaaaagttgcggaaattattgccaattctactgtggcgccagatgtggccttatcgggccgcatgttggagccacacaaggacgctaaggatgtctggaacaacctaaataccaccgtcgaggcggcattgcaagtcgctcatgccatttccacccatgaagcccgcatggatgtggactactatgttgccgcagacgacattcctggcgaggatgccggggccggatatgtagccgaggccatgtatgcatcggcctgcttctacaagtatttttccattcactgggaaaagctggttcagaacctcaaaggcttcggagatggccacaaagagttggccgcccacaccgtcggtgcttttctacgcggtgcggctttggcgactcccaccggcaagcagaacagctttgcggcacacaatccgcccgacggcatcctggtggaaatcaagaacagcccgaccagttacgccaatgcctttgccaaaccggccgcgaatggcgaccgcgacatcgtcgcgcagagcatcgcccagcttgggcagtacattcacgatcttgacgtgggatttggcgcccccgctcgcgaaaaacgtttttggttctcgcccaataaccgacactcacttacttacgttaagaaagaagtcattggggagggcgacaaggtagaggaagtcgagatcgacgcccagaggcacaattcgctagacgatctggttgtctccgttatcaagtccattggtttcgactggcaagatgtgcaacgggtcgtcgtgaatgaggagtctaaatgatggacgccaacacccttttcctgcgcctggaaggtccccttcaggcttggggcgatacgtcgaagtttgttatgcgtcgcaccatgcccgcgccgacaaagtccggcgtattcggcatgctctgcgcggcgatgggcattccgcgggccgaagccgccgaaatctggttgccaaggcttgccgagctgcaaatgggcgtccgcattgaccgacccggcacgcgctggtgggactatcacaccgttggcgccggcatcggcctgatgacggccgcgggcaaattgaagacaggaccgcaaggcacgcttatcacccgccgtgaataccttgccgacgccggtttcctggtggctctgcaaggtgagccggctcttatcgacaccctggccgaggcagtgaagaatccacgctggacgccctacctgggccgcaaatgttgcccgccctgccggccgctgtgggaacatccgccggcgacattttccgatgtggcttcggcgttgacgtcgctcccttggcagccgcggttcaaggacgatcccaaaccaaagtgtttggattgcctgatcgactggacgccgaccgccgagcagccggaagcgccgctcgatgcgcaggtctggtacgacgtgcccttgacgttcgagccgccttcgcaccgcccgcgatttgtaattcagaagcaactcgatgtcggcaatggcggccaggttcatgtggcagaccagccggcgcagaaccggactccgccgccgccgcgtccccgggcaaactacaacaatgcggagtacaagcgtcgccgcgccgagcggctacaggccgattgggggctgtgcgtcttctgcaagttgccggcaaccaccgtccagcatgttacctaccgccgggccggcggcaaggaagaaccgaacgacctacgttccctttgccgcctctgccacgacgccgtgacgatgatcgaatacggcctgggcatggggctggatcgcatcaatccccaagacccgcaatggcgcgaccgcattatcgccaagcgcgatgaaatcgtccgctcccgttcactagaaacccgccgccgccggctcagtcccgaggaggtcgaatagccatgtatctctcttgtttaatgatcgacgtaggaaccaatcccgaccgtccgcgaccggggcgcctctggctgcgcaacctctaccgcgttcaccagcggctttgcatggcctttcccgtagcggaacacaaacataacgaccctcagttcctagccccatatcaaccgcaatactttcccttgcagcgccatcttgccgaccggctggagcgcaatgggaagcggtacaaggagcttgagaataagaacaacgtttcagatacgcccttgccagaggaacaaaaccctacagcaaagctggccgctgccattgacaaggccgtgcttgacgaaattcatttggagcgcagcgagcagcagggctttcttttccgcatcgacccgaaacatgccggcagggtgatgattatcgtccagtcggccgtcgagccggactgggattacgccttccacaatgcgcgacnnnnnnnnnntgcgcgacattttctcgccgctgctcccgagatcaagcattttgatcctatttttactgcgggcgaacgtctgcgattccgactggttgccaatccgacgcgacgcttgcacgagaaatcgctcggaagagatggtcaacccgttgccgaaaggtgggtgggaaaacgagtccccgttttccctgacaaactctgtgaatggcttgcgcaatggactcccaaaaaaaatgttccctctgggttctgccccgttgaaaactctgtcgtggtacaaacgggctatgtctatgtcaacaaaaatcccctccatgccagcaaaaacgccaccggcggcggacaacgcctctttgccgcgcgatacgacggcctgttgaccgtgactgattgcaaccaattccgcaaaacgctgatccaaggcgtcgggccggccaaggccttcggtttcggattgctcagtctaggcagggtgaagcaatgaataatctccacgaactggcccgcttcgaggatcggattacctatctttatctcgaaaaatgccgcatcgagcagcatcaaacctccgtcgcctacgttaccgaaaaggaaaccgtgcccatcccggcggcgaacctggccttgttgatgctcggaccgggcaccagcatcacccacgccgccatccgcaatctggccgactgcaactgtctggtggcatggtgcggcgacgagggcacgcgcttctacagcttcggccgcggcggcacgtatcactccgcgaaactcctgcgccaagccgagttgtattgcaatcttcgcacccgtgccctagtggtccgaagaatgtatgaaaaacgattcggacaacccctcgaacccggcctgacattggagcagattcgcgggcgagaaggccatcgtgtccgcaacgcctaccgccaggcggccgagaagttcaacctaaaatgggaaggacgcaactatgacccaaacaactgggacaaagccgatccactcaatcgtgccctgtcggccgccaacgcctgcttgcacggcatcgttcatgccgccatcgtcaccgccggctactcccccgccattggctttatccacaccggcaaagccctctcgttcgtctacgacatcgccgatttgtacaaagttgacttgatcgtgccaatggcgtttgaggtcgtcgcctatagcgaaaacagcgtggaacagcgggcacgcatgggcagccgcgacctgttccacgatacacgtctgctggaaaaaatacttcccgacatcgaggagattttatatggtcgtgatgattctggagcgcgtcccgccgggcctcaggggcgacctgagccgttggatgatcgaaccgaaggccgggatattcctcggccgtatgacagcccgcctccgtgacaaactttgggaaaaagccgtcgccggctgtcgcggcggaagttgcctccaagcatggagctcgccgtgcgagcaaggattcacaatccgcacccacggcgacacttcccgaaagatgatcgttatcgaggggctatccctagtggcctagacccattcacatacaagatgttgatggcttccccatgcacatggggctgaaccgacttatgggagcggcggcttgaccgtgaaaaagtcttccccatgcacatggggctgaaccgacggcattgccggcctcgatcgagccaccattgcgtcttccccatgcacatggggctgaaccgttcgagtagcagtagcaaaaccagaaaaacatcgtcttccccatgcacatggggctgaaccgcttcccagcgttctcgttcatcggccagaaagagtcttccccatgca

SEQ ID NO: 1120 - DNA, 103334 bp, Artificial Sequence
  Synthetic Oligonucleotide
  misc_feature (1)..(96367): n is a, c, g, or t
nnnnnnnnnnnnnnnnnnnnnnnnnnnnnnnnnnnnnnnnnnnnnnnnnnnnnnnnnnnnnnnnnnnnnnnnnnnnnnnnnnnnnnnnnnnnnnnnnnnnnnnnnnnnnnnnnnnnnnnnnnnnnnnnnnnnnnnnnnnnnnnnnnnnnnnnnnnnnnnnnnnnnnnnnnnnnnnnnnnnnnnnnnnnnnnnnnnnnnnnnnnnnnnnnnnnnnnnnnnnnnnnnnnnnnnnnnnnnnnnnnnnnnnnnnnnnnnnnnnnnnnnnnnnnnnnnnnnnnnnnnnnnnnnnnnnnnnnnnnnnnnnnnnnnnnnnnnnnnnnnnnnnnnnnnnnnnnnnnnnnnnnnnnnnnnnnnnnnnnnnnnnnnnnnnnnnnnnnnnnnnnnnnnnnnnnnnnnnnnnnnnnnnnnnnnnnnnnnnnnnnnnnnnnnnnnnnnnnnnnnnnnnnnnnnnnnnnnnnnnnnnnnnnnnnnnnnnnnnnnnnnnnnnnnnnnnnnnnnnnnnnnnnnnnnnnnnnnnnnnnnnnnnnnnnnnnnnnnnnnnnnnnnnnnnnnnnnnnnnnnnnnnnnnnnnnnnnnnnnnnnnnnnnnnnnnnnnnnnnnnnnnnnnnnnnnnnnnnnnnnnnnnnnnnnnnnnnnnnnnnnnnnnnnnnnnnnnnnnnnnnnnnnnnnnnnnnnnnnnnnnnnnnnnnnnnnnnnnnnnnnnnnnnnnnnnnnnnnnnnnnnnnnnnnnnnnnnnnnnnnnnnnnnnnnnnnnnnnnnnnnnnnnnnnnnnnnnnnnnnnnnnnnnnnnnnnnnnnnnnnnnnnnnnnnnnnnnnnnnnnnnnnnnnnnnnnnnnnnnnnnnnnnnnnnnnnnnnnnnnnnnnnnnnnnnnnnnnnnnnnnnnnnnnnnnnnnnnnnnnnnnnnnnnnnnnnnnnnnnnnnnnnnnnnnnnnnnnnnnnnnnnnnnnnnnnnnnnnnnnnnnnnnnnnnnnnnnnnnnnnnnnnnnnnnnnnnnnnnnnnnnnnnnnnnnnnnnnnnnnnnnnnnnnnnnnnnnnnnnnnnnnnnnnnnnnnnnnnnnnnnnnnnnnnnnnnnnnnnnnnnnnnnnnnnnnnnnnnnnnnnnnnnnnnnnnnnnnnnnnnnnnnnnnnnnnnnnnnnnnnnnnnnnnnnnnnnnnnnnnnnnnnnnnnnnnnnnnnnnnnnnnnnnnnnnnnnnnnnnnnnnnnnnnnnnnnnnnnnnnnnnnnnnnnnnnnnnnnnnnnnnnnnnnnnnnnnnnnnnnnnnnnnnnnnnnnnnnnnnnnnnnnnnnnnnnnnnnnnnnnnnnnnnnnnnnnnnnnnnnnnnnnnnnnnnnnnnnnnnnnnnnnnnnnnnnnnnnnnnnnnnnnnnnnnnnnnnnnnnnnnnnnnnnnnnnnnnnnnnnnnnnnnnnnnnnnnnnnnnnnnnnnnnnnnnnnnnnnnnnnnnnnnnnnnnnnnnnnnnnnnnnnnnnnnnnnnnnnnnnnnnnnnnnnnnnnnnnnnnnnnnnnnnnnnnnnnnnnnnnnnnnnnnnnnnnnnnnnnnnnnnnnnnnnnnnnnnnnnnnnnnnnnnnnnnnnnnnnnnnnnnnnnnnnnnnnnnnnnnnnnnnnnnnnnnnnnnnnnnnnnnnnnnnnnnnnnnnnnnnnnnnnnnnnnnnnnnnnnnnnnnnnnnnnnnnnnnnnnnnnnnnnnnnnnnnnnnnnnnnnnnnnnnnnnnnnnnnnnnnnnnnnnnnnnnnnnnnnnnnnnnnnnnnnnnnnnnnnnnnnnnnnnnnnnnnnnnnnnnnnnnnnnnnnnnnnnnnnnnnnnnnnnnnnnnnnnnnnnnnnnnnnnnnnnnnnnnnnnnnnnnnnnnnnnnnnnnnnnnnnnnnnnnnnnnnnnnnnnnnnnnnnnnnnnnnnnnnnnnnnnnnnnnnnnnnnnnnnnnnnnnnnnnnnnnnnnnnnnnnnnnnnnnnnnnnnnnnnnnnnnnnnnnnnnnnnnnnnnnnnnnnnnnnnnnnnnnnnnnnnnnnnnnnnnnnnnnnnnnnnnnnnnnnnnnnnnnnnnnnnnnnnnnnnnnnnnnnnnnnnnnnnnnnnnnnnnnnnnnnnnnnnnnnnnnnnnnnnnnnnnnnnnnnnnnnnnnnnnnnnnnnnnnnnnnnnnnnnnnnnnnnnnnnnnnnnnnnnnnnnnnnnnnnnnnnnnnnnnnnnnnnnnnnnnnnnnnnnnnnnnnnnnnnnnnnnnnnnnnnnnnnnnnnnnnnnnnnnnnnnnnnnnnnnnnnnnnnnnnnnnnnnnnnnnnnnnnnnnnnnnnnnnnnnnnnnnnnnnnnnnnnnnnnnnnnnnnnnnnnnnnnnnnnnnnnnnnnnnnnnnnnnnnnnnnnnnnnnnnnnnnnnnnnnnnnnnnnnnnnnnnnnnnnnnnnnnnnnnnnnnnnnnnnnnnnnnnnnnnnnnnnnnnnnnnnnnnnnnnnnnnnnnnnnnnnnnnnnnnnnnnnnnnnnnnnnnnnnnnnnnnnnnnnnnnnnnnnnnnnnnnnnnnnnnnnnnnnnnnnnnnnnnnnnnnnnnnnnnnnnnnnnnnnnnnnnnnnnnnnnnnnnnnnnnnnnnnnnnnnnnnnnnnnnnnnnnnnnnnnnnnnnnnnnnnnnnnnnnnnnnnnnnnnnnnnnnnnnnnnnnnnnnnnnnnnnnnnnnnnnnnnnnnnnnnnnnnnnnnnnnnnnnnnnnnnnnnnnnnnnnnnnnnnnnnnnnnnnnnnnnnnnnnnnnnnnnnnnnnnnnnnnnnnnnnnnnnnnnnnnnnnnnnnnnnnnnnnnnnnnnnnnnnnnnnnnnnnnnnnnnnnnnnnnnnnnnnnnnnnnnnnnnnnnnnnnnnnnnnnnnnnnnnnnnnnnnnnnnnnnnnnnnnnnnnnnnnnnnnnnnnnnnnnnnnnnnnnnnnnnnnnnnnnnnnnnnnnnnnnnnnnnnnnnnnnnnnnnnnnnnnnnnnnnnnnnnnnnnnnnnnnnnnnnnnnnnnnnnnnnnnnnnnnnnnnnnnnnnnnnnnnnnnnnnnnnnnnnnnnnnnnnnnnnnnnnnnnnnnnnnnnnnnnnnnnnnnnnnnnnnnnnnnnnnnnnnnnnnnnnnnnnnnnnnnnnnnnnnnnnnnnnnnnnnnnnnnnnnnnnnnnnnnnnnnnnnnnnnnnnnnnnnnnnnnnnnnnnnnnnnnnnnnnnnnnnnnnnnnnnnnnnnnnnnnnnnnnnnnnnnnnnnnnnnnnnnnnnnnnnnnnnnnnnnnnnnnnnnnnnnnnnnnnnnnnnnnnnnnnnnnnnnnnnnnnnnnnnnnnnnnnnnnnnnnnnnnnnnnnnnnnnnnnnnnnnnnnnnnnnnnnnnnnnnnnnnnnnnnnnnnnnnnnnnnnnnnnnnnnnnnnnnnnnnnnnnnnnnnnnnnnnnnnnnnnnnnnnnnnnnnnnnnnnnnnnnnnnnnnnnnnnnnnnnnnnnnnnnnnnnnnnnnnnnnnnnnnnnnnnnnnnnnnnnnnnnnnnnnnnnnnnnnnnnnnnnnnnnnnnnnnnnnnnnnnnnnnnnnnnnnnnnnnnnnnnnnnnnnnnnnnnnnnnnnnnnnnnnnnnnnnnnnnnnnnnnnnnnnnnnnnnnnnnnnnnnnnnnnnnnnnnnnnnnnnnnnnnnnnnnnnnnnnnnnnnnnnnnnnnnnnnnnnnnnnnnnnnnnnnnnnnnnnnnnnnnnnnnnnnnnnnnnnnnnnnnnnnnnnnnnnnnnnnnnnnnnnnnnnnnnnnnnnnnnnnnnnnnnnnnnnnnnnnnnnnnnnnnnnnnnnnnnnnnnnnnnnnnnnnnnnnnnnnnnnnnnnnnnnnnnnnnnnnnnnnnnnnnnnnnnnnnnnnnnnnnnnnnnnnnnnnnnnnnnnnnnnnnnnnnnnnnnnnnnnnnnnnnnnnnnnnnnnnnnnnnnnnnnnnnnnnnnnnnnnnnnnnnnnnnnnnnnnnnnnnnnnnnnnnnnnnnnnnnnnnnnnnnnnnnnnnnnnnnnnnnnnnnnnnnnnnnnnnnnnnnnnnnnnnnnnnnnnnnnnnnnnnnnnnnnnnnnnnnnnnnnnnnnnnnnnnnnnnnnnnnnnnnnnnnnnnnnnnnnnnnnnnnnnnnnnnnnnnnnnnnnnnnnnnnnnnnnnnnnnnnnnnnnnnnnnnnnnnnnnnnnnnnnnnnnnnnnnnnnnnnnnnnnnnnnnnnnnnnnnnnnnnnnnnnnnnnnnnnnnnnnnnnnnnnnnnnnnnnnnnnnnnnnnnnnnnnnnnnnnnnnnnnnnnnnnnnnnnnnnnnnnnnnnnnnnnnnnnnnnnnnnnnnnnnnnnnnnnnnnnnnnnnnnnnnnnnnnnnnnnnnnnnnnnnnnnnnnnnnnnnnnnnnnnnnnnnnnnnnnnnnnnnnnnnnnnnnnnnnnnnnnnnnnnnnnnnnnnnnnnnnnnnnnnnnnnnnnnnnnnnnnnnnnnnnnnnnnnnnnnnnnnnnnnnnnnnnnnnnnnnnnnnnnnnnnnnnnnnnnnnnnnnnnnnnnnnnnnnnnnnnnnnnnnnnnnnnnnnnnnnnnnnnnnnnnnnnnnnnnnnnnnnnnnnnnnnnnnnnnnnnnnnnnnnnnnnnnnnnnnnnnnnnnnnnnnnnnnnnnnnnnnnnnnnnnnnnnnnnnnnnnnnnnnnnnnnnnnnnnnnnnnnnnnnnnnnnnnnnnnnnnnnnnnnnnnnnnnnnnnnnnnnnnnnnnnnnnnnnnnnnnnnnnnnnnnnnnnnnnnnnnnnnnnnnnnnnnnnnnnnnnnnnnnnnnnnnnnnnnnnnnnnnnnnnnnnnnnnnnnnnnnnnnnnnnnnnnnnnnnnnnnnnnnnnnnnnnnnnnnnnnnnnnnnnnnnnnnnnnnnnnnnnnnnnnnnnnnnnnnnnnnnnnnnnnnnnnnnnnnnnnnnnnnnnnnnnnnnnnnnnnnnnnnnnnnnnnnnnnnnnnnnnnnnnnnnnnnnnnnnnnnnnnnnnnnnnnnnnnnnnnnnnnnnnnnnnnnnnnnnnnnnnnnnnnnnnnnnnnnnnnnnnnnnnnnnnnnnnnnnnnnnnnnnnnnnnnnnnnnnnnnnnnnnnnnnnnnnnnnnnnnnnnnnnnnnnnnnnnnnnnnnnnnnnnnnnnnnnnnnnnnnnnnnnnnnnnnnnnnnnnnnnnnnnnnnnnnnnnnnnnnnnnnnnnnnnnnnnnnnnnnnnnnnnnnnnnnnnnnnnnnnnnnnnnnnnnnnnnnnnnnnnnnnnnnnnnnnnnnnnnnnnnnnnnnnnnnnnnnnnnnnnnnnnnnnnnnnnnnnnnnnnnnnnnnnnnnnnnnnnnnnnnnnnnnnnnnnnnnnnnnnnnnnnnnnnnnnnnnnnnnnnnnnnnnnnnnnnnnnnnnnnnnnnnnnnnnnnnnnnnnnnnnnnnnnnnnnnnnnnnnnnnnnnnnnnnnnnnnnnnnnnnnnnnnnnnnnnnnnnnnnnnnnnnnnnnnnnnnnnnnnnnnnnnnnnnnnnnnnnnnnnnnnnnnnnnnnnnnnnnnnnnnnnnnnnnnnnnnnnnnnnnnnnnnnnnnnnnnnnnnnnnnnnnnnnnnnnnnnnnnnnnnnnnnnnnnnnnnnnnnnnnnnnnnnnnnnnnnnnnnnnnnnnnnnnnnnnnnnnnnnnnnnnnnnnnnnnnnnnnnnnnnnnnnnnnnnnnnnnnnnnnnnnnnnnnnnnnnnnnnnnnnnnnnnnnnnnnnnnnnnnnnnnnnnnnnnnnnnnnnnnnnnnnnnnnnnnnnnnnnnnnnnnnnnnnnnnnnnnnnnnnnnnnnnnnnnnnnnnnnnnnnnnnnnnnnnnnnnnnnnnnnnnnnnnnnnnnnnnnnnnnnnnnnnnnnnnnnnnnnnnnnnnnnnnnnnnnnnnnnnnnnnnnnnnnnnnnnnnnnnnnnnnnnnnnnnnnnnnnnnnnnnnnnnnnnnnnnnnnnnnnnnnnnnnnnnnnnnnnnnnnnnnnnnnnnnnnnnnnnnnnnnnnnnnnnnnnnnnnnnnnnnnnnnnnnnnnnnnnnnnnnnnnnnnnnnnnnnnnnnnnnnnnnnnnnnnnnnnnnnnnnnnnnnnnnnnnnnnnnnnnnnnnnnnnnnnnnnnnnnnnnnnnnnnnnnnnnnnnnnnnnnnnnnnnnnnnnnnnnnnnnnnnnnnnnnnnnnnnnnnnnnnnnnnnnnnnnnnnnnnnnnnnnnnnnnnnnnnnnnnnnnnnnnnnnnnnnnnnnnnnnnnnnnnnnnnnnnnnnnnnnnnnnnnnnnnnnnnnnnnnnnnnnnnnnnnnnnnnnnnnnnnnnnnnnnnnnnnnnnnnnnnnnnnnnnnnnnnnnnnnnnnnnnnnnnnnnnnnnnnnnnnnnnnnnnnnnnnnnnnnnnnnnnnnnnnnnnnnnnnnnnnnnnnnnnnnnnnnnnnnnnnnnnnnnnnnnnnnnnnnnnnnnnnnnnnnnnnnnnnnnnnnnnnnnnnnnnnnnnnnnnnnnnnnnnnnnnnnnnnnnnnnnnnnnnnnnnnnnnnnnnnnnnnnnnnnnnnnnnnnnnnnnnnnnnnnnnnnnnnnnnnnnnnnnnnnnnnnnnnnnnnnnnnnnnnnnnnnnnnnnnnnnnnnnnnnnnnnnnnnnnnnnnnnnnnnnnnnnnnnnnnnnnnnnnnnnnnnnnnnnnnnnnnnnnnnnnnnnnnnnnnnnnnnnnnnnnnnnnnnnnnnnnnnnnnnnnnnnnnnnnnnnnnnnnnnnnnnnnnnnnnnnnnnnnnnnnnnnnnnnnnnnnnnnnnnnnnnnnnnnnnnnnnnnnnnnnnnnnnnnnnnnnnnnnnnnnnnnnnnnnnnnnnnnnnnnnnnnnnnnnnnnnnnnnnnnnnnnnnnnnnnnnnnnnnnnnnnnnnnnnnnnnnnnnnnnnnnnnnnnnnnnnnnnnnnnnnnnnnnnnnnnnnnnnnnnnnnnnnnnnnnnnnnnnnnnnnnnnnnnnnnnnnnnnnnnnnnnnnnnnnnnnnnnnnnnnnnnnnnnnnnnnnnnnnnnnnnnnnnnnnnnnnnnnnnnnnnnnnnnnnnnnnnnnnnnnnnnnnnnnnnnnnnnnnnnnnnnnnnnnnnnnnnnnnnnnnnnnnnnnnnnnnnnnnnnnnnnnnnnnnnnnnnnnnnnnnnnnnnnnnnnnnnnnnnnnnnnnnnnnnnnnnnnnnnnnnnnnnnnnnnnnnnnnnnnnnnnnnnnnnnnnnnnnnnnnnnnnnnnnnnnnnnnnnnnnnnnnnnnnnnnnnnnnnnnnnnnnnnnnnnnnnnnnnnnnnnnnnnnnnnnnnnnnnnnnnnnnnnnnnnnnnnnnnnnnnnnnnnnnnnnnnnnnnnnnnnnnnnnnnnnnnnnnnnnnnnnnnnnnnnnnnnnnnnnnnnnnnnnnnnnnnnnnnnnnnnnnnnnnnnnnnnnnnnnnnnnnnnnnnnnnnnnnnnnnnnnnnnnnnnnnnnnnnnnnnnnnnnnnnnnnnnnnnnnnnnnnnnnnnnnnnnnnnnnnnnnnnnnnnnnnnnnnnnnnnnnnnnnnnnnnnnnnnnnnnnnnnnnnnnnnnnnnnnnnnnnnnnnnnnnnnnnnnnnnnnnnnnnnnnnnnnnnnnnnnnnnnnnnnnnnnnnnnnnnnnnnnnnnnnnnnnnnnnnnnnnnnnnnnnnnnnnnnnnnnnnnnnnnnnnnnnnnnnnnnnnnnnnnnnnnnnnnnnnnnnnnnnnnnnnnnnnnnnnnnnnnnnnnnnnnnnnnnnnnnnnnnnnnnnnnnnnnnnnnnnnnnnnnnnnnnnnnnnnnnnnnnnnnnnnnnnnnnnnnnnnnnnnnnnnnnnnnnnnnnnnnnnnnnnnnnnnnnnnnnnnnnnnnnnnnnnnnnnnnnnnnnnnnnnnnnnnnnnnnnnnnnnnnnnnnnnnnnnnnnnnnnnnnnnnnnnnnnnnnnnnnnnnnnnnnnnnnnnnnnnnnnnnnnnnnnnnnnnnnnnnnnnnnnnnnnnnnnnnnnnnnnnnnnnnnnnnnnnnnnnnnnnnnnnnnnnnnnnnnnnnnnnnnnnnnnnnnnnnnnnnnnnnnnnnnnnnnnnnnnnnnnnnnnnnnnnnnnnnnnnnnnnnnnnnnnnnnnnnnnnnnnnnnnnnnnnnnnnnnnnnnnnnnnnnnnnnnnnnnnnnnnnnnnnnnnnnnnnnnnnnnnnnnnnnnnnnnnnnnnnnnnnnnnnnnnnnnnnnnnnnnnnnnnnnnnnnnnnnnnnnnnnnnnnnnnnnnnnnnnnnnnnnnnnnnnnnnnnnnnnnnnnnnnnnnnnnnnnnnnnnnnnnnnnnnnnnnnnnnnnnnnnnnnnnnnnnnnnnnnnnnnnnnnnnnnnnnnnnnnnnnnnnnnnnnnnnnnnnnnnnnnnnnnnnnnnnnnnnnnnnnnnnnnnnnnnnnnnnnnnnnnnnnnnnnnnnnnnnnnnnnnnnnnnnnnnnnnnnnnnnnnnnnnnnnnnnnnnnnnnnnnnnnnnnnnnnnnnnnnnnnnnnnnnnnnnnnnnnnnnnnnnnnnnnnnnnnnnnnnnnnnnnnnnnnnnnnnnnnnnnnnnnnnnnnnnnnnnnnnnnnnnnnnnnnnnnnnnnnnnnnnnnnnnnnnnnnnnnnnnnnnnnnnnnnnnnnnnnnnnnnnnnnnnnnnnnnnnnnnnnnnnnnnnnnnnnnnnnnnnnnnnnnnnnnnnnnnnnnnnnnnnnnnnnnnnnnnnnnnnnnnnnnnnnnnnnnnnnnnnnnnnnnnnnnnnnnnnnnnnnnnnnnnnnnnnnnnnnnnnnnnnnnnnnnnnnnnnnnnnnnnnnnnnnnnnnnnnnnnnnnnnnnnnnnnnnnnnnnnnnnnnnnnnnnnnnnnnnnnnnnnnnnnnnnnnnnnnnnnnnnnnnnnnnnnnnnnnnnnnnnnnnnnnnnnnnnnnnnnnnnnnnnnnnnnnnnnnnnnnnnnnnnnnnnnnnnnnnnnnnnnnnnnnnnnnnnnnnnnnnnnnnnnnnnnnnnnnnnnnnnnnnnnnnnnnnnnnnnnnnnnnnnnnnnnnnnnnnnnnnnnnnnnnnnnnnnnnnnnnnnnnnnnnnnnnnnnnnnnnnnnnnnnnnnnnnnnnnnnnnnnnnnnnnnnnnnnnnnnnnnnnnnnnnnnnnnnnnnnnnnnnnnnnnnnnnnnnnnnnnnnnnnnnnnnnnnnnnnnnnnnnnnnnnnnnnnnnnnnnnnnnnnnnnnnnnnnnnnnnnnnnnnnnnnnnnnnnnnnnnnnnnnnnnnnnnnnnnnnnnnnnnnnnnnnnnnnnnnnnnnnnnnnnnnnnnnnnnnnnnnnnnnnnnnnnnnnnnnnnnnnnnnnnnnnnnnnnnnnnnnnnnnnnnnnnnnnnnnnnnnnnnnnnnnnnnnnnnnnnnnnnnnnnnnnnnnnnnnnnnnnnnnnnnnnnnnnnnnnnnnnnnnnnnnnnnnnnnnnnnnnnnnnnnnnnnnnnnnnnnnnnnnnnnnnnnnnnnnnnnnnnnnnnnnnnnnnnnnnnnnnnnnnnnnnnnnnnnnnnnnnnnnnnnnnnnnnnnnnnnnnnnnnnnnnnnnnnnnnnnnnnnnnnnnnnnnnnnnnnnnnnnnnnnnnnnnnnnnnnnnnnnnnnnnnnnnnnnnnnnnnnnnnnnnnnnnnnnnnnnnnnnnnnnnnnnnnnnnnnnnnnnnnnnnnnnnnnnnnnnnnnnnnnnnnnnnnnnnnnnnnnnnnnnnnnnnnnnnnnnnnnnnnnnnnnnnnnnnnnnnnnnnnnnnnnnnnnnnnnnnnnnnnnnnnnnnnnnnnnnnnnnnnnnnnnnnnnnnnnnnnnnnnnnnnnnnnnnnnnnnnnnnnnnnnnnnnnnnnnnnnnnnnnnnnnnnnnnnnnnnnnnnnnnnnnnnnnnnnnnnnnnnnnnnnnnnnnnnnnnnnnnnnnnnnnnnnnnnnnnnnnnnnnnnnnnnnnnnnnnnnnnnnnnnnnnnnnnnnnnnnnnnnnnnnnnnnnnnnnnnnnnnnnnnnnnnnnnnnnnnnnnnnnnnnnnnnnnnnnnnnnnnnnnnnnnnnnnnnnnnnnnnnnnnnnnnnnnnnnnnnnnnnnnnnnnnnnnnnnnnnnnnnnnnnnnnnnnnnnnnnnnnnnnnnnnnnnnnnnnnnnnnnnnnnnnnnnnnnnnnnnnnnnnnnnnnnnnnnnnnnnnnnnnnnnnnnnnnnnnnnnnnnnnnnnnnnnnnnnnnnnnnnnnnnnnnnnnnnnnnnnnnnnnnnnnnnnnnnnnnnnnnnnnnnnnnnnnnnnnnnnnnnnnnnnnnnnnnnnnnnnnnnnnnnnnnnnnnnnnnnnnnnnnnnnnnnnnnnnnnnnnnnnnnnnnnnnnnnnnnnnnnnnnnnnnnnnnnnnnnnnnnnnnnnnnnnnnnnnnnnnnnnnnnnnnnnnnnnnnnnnnnnnnnnnnnnnnnnnnnnnnnnnnnnnnnnnnnnnnnnnnnnnnnnnnnnnnnnnnnnnnnnnnnnnnnnnnnnnnnnnnnnnnnnnnnnnnnnnnnnnnnnnnnnnnnnnnnnnnnnnnnnnnnnnnnnnnnnnnnnnnnnnnnnnnnnnnnnnnnnnnnnnnnnnnnnnnnnnnnnnnnnnnnnnnnnnnnnnnnnnnnnnnnnnnnnnnnnnnnnnnnnnnnnnnnnnnnnnnnnnnnnnnnnnnnnnnnnnnnnnnnnnnnnnnnnnnnnnnnnnnnnnnnnnnnnnnnnnnnnnnnnnnnnnnnnnnnnnnnnnnnnnnnnnnnnnnnnnnnnnnnnnnnnnnnnnnnnnnnnnnnnnnnnnnnnnnnnnnnnnnnnnnnnnnnnnnnnnnnnnnnnnnnnnnnnnnnnnnnnnnnnnnnnnnnnnnnnnnnnnnnnnnnnnnnnnnnnnnnnnnnnnnnnnnnnnnnnnnnnnnnnnnnnnnnnnnnnnnnnnnnnnnnnnnnnnnnnnnnnnnnnnnnnnnnnnnnnnnnnnnnnnnnnnnnnnnnnnnnnnnnnnnnnnnnnnnnnnnnnnnnnnnnnnnnnnnnnnnnnnnnnnnnnnnnnnnnnnnnnnnnnnnnnnnnnnnnnnnnnnnnnnnnnnnnnnnnnnnnnnnnnnnnnnnnnnnnnnnnnnnnnnnnnnnnnnnnnnnnnnnnnnnnnnnnnnnnnnnnnnnnnnnnnnnnnnnnnnnnnnnnnnnnnnnnnnnnnnnnnnnnnnnnnnnnnnnnnnnnnnnnnnnnnnnnnnnnnnnnnnnnnnnnnnnnnnnnnnnnnnnnnnnnnnnnnnnnnnnnnnnnnnnnnnnnnnnnnnnnnnnnnnnnnnnnnnnnnnnnnnnnnnnnnnnnnnnnnnnnnnnnnnnnnnnnnnnnnnnnnnnnnnnnnnnnnnnnnnnnnnnnnnnnnnnnnnnnnnnnnnnnnnnnnnnnnnnnnnnnnnnnnnnnnnnnnnnnnnnnnnnnnnnnnnnnnnnnnnnnnnnnnnnnnnnnnnnnnnnnnnnnnnnnnnnnnnnnnnnnnnnnnnnnnnnnnnnnnnnnnnnnnnnnnnnnnnnnnnnnnnnnnnnnnnnnnnnnnnnnnnnnnnnnnnnnnnnnnnnnnnnnnnnnnnnnnnnnnnnnnnnnnnnnnnnnnnnnnnnnnnnnnnnnnnnnnnnnnnnnnnnnnnnnnnnnnnnnnnnnnnnnnnnnnnnnnnnnnnnnnnnnnnnnnnnnnnnnnnnnnnnnnnnnnnnnnnnnnnnnnnnnnnnnnnnnnnnnnnnnnnnnnnnnnnnnnnnnnnnnnnnnnnnnnnnnnnnnnnnnnnnnnnnnnnnnnnnnnnnnnnnnnnnnnnnnnnnnnnnnnnnnnnnnnnnnnnnnnnnnnnnnnnnnnnnnnnnnnnnnnnnnnnnnnnnnnnnnnnnnnnnnnnnnnnnnnnnnnnnnnnnnnnnnnnnnnnnnnnnnnnnnnnnnnnnnnnnnnnnnnnnnnnnnnnnnnnnnnnnnnnnnnnnnnnnnnnnnnnnnnnnnnnnnnnnnnnnnnnnnnnnnnnnnnnnnnnnnnnnnnnnnnnnnnnnnnnnnnnnnnnnnnnnnnnnnnnnnnnnnnnnnnnnnnnnnnnnnnnnnnnnnnnnnnnnnnnnnnnnnnnnnnnnnnnnnnnnnnnnnnnnnnnnnnnnnnnnnnnnnnnnnnnnnnnnnnnnnnnnnnnnnnnnnnnnnnnnnnnnnnnnnnnnnnnnnnnnnnnnnnnnnnnnnnnnnnnnnnnnnnnnnnnnnnnnnnnnnnnnnnnnnnnnnnnnnnnnnnnnnnnnnnnnnnnnnnnnnnnnnnnnnnnnnnnnnnnnnnnnnnnnnnnnnnnnnnnnnnnnnnnnnnnnnnnnnnnnnnnnnnnnnnnnnnnnnnnnnnnnnnnnnnnnnnnnnnnnnnnnnnnnnnnnnnnnnnnnnnnnnnnnnnnnnnnnnnnnnnnnnnnnnnnnnnnnnnnnnnnnnnnnnnnnnnnnnnnnnnnnnnnnnnnnnnnnnnnnnnnnnnnnnnnnnnnnnnnnnnnnnnnnnnnnnnnnnnnnnnnnnnnnnnnnnnnnnnnnnnnnnnnnnnnnnnnnnnnnnnnnnnnnnnnnnnnnnnnnnnnnnnnnnnnnnnnnnnnnnnnnnnnnnnnnnnnnnnnnnnnnnnnnnnnnnnnnnnnnnnnnnnnnnnnnnnnnnnnnnnnnnnnnnnnnnnnnnnnnnnnnnnnnnnnnnnnnnnnnnnnnnnnnnnnnnnnnnnnnnnnnnnnnnnnnnnnnnnnnnnnnnnnnnnnnnnnnnnnnnnnnnnnnnnnnnnnnnnnnnnnnnnnnnnnnnnnnnnnnnnnnnnnnnnnnnnnnnnnnnnnnnnnnnnnnnnnnnnnnnnnnnnnnnnnnnnnnnnnnnnnnnnnnnnnnnnnnnnnnnnnnnnnnnnnnnnnnnnnnnnnnnnnnnnnnnnnnnnnnnnnnnnnnnnnnnnnnnnnnnnnnnnnnnnnnnnnnnnnnnnnnnnnnnnnnnnnnnnnnnnnnnnnnnnnnnnnnnnnnnnnnnnnnnnnnnnnnnnnnnnnnnnnnnnnnnnnnnnnnnnnnnnnnnnnnnnnnnnnnnnnnnnnnnnnnnnnnnnnnnnnnnnnnnnnnnnnnnnnnnnnnnnnnnnnnnnnnnnnnnnnnnnnnnnnnnnnnnnnnnnnnnnnnnnnnnnnnnnnnnnnnnnnnnnnnnnnnnnnnnnnnnnnnnnnnnnnnnnnnnnnnnnnnnnnnnnnnnnnnnnnnnnnnnnnnnnnnnnnnnnnnnnnnnnnnnnnnnnnnnnnnnnnnnnnnnnnnnnnnnnnnnnnnnnnnnnnnnnnnnnnnnnnnnnnnnnnnnnnnnnnnnnnnnnnnnnnnnnnnnnnnnnnnnnnnnnnnnnnnnnnnnnnnnnnnnnnnnnnnnnnnnnnnnnnnnnnnnnnnnnnnnnnnnnnnnnnnnnnnnnnnnnnnnnnnnnnnnnnnnnnnnnnnnnnnnnnnnnnnnnnnnnnnnnnnnnnnnnnnnnnnnnnnnnnnnnnnnnnnnnnnnnnnnnnnnnnnnnnnnnnnnnnnnnnnnnnnnnnnnnnnnnnnnnnnnnnnnnnnnnnnnnnnnnnnnnnnnnnnnnnnnnnnnnnnnnnnnnnnnnnnnnnnnnnnnnnnnnnnnnnnnnnnnnnnnnnnnnnnnnnnnnnnnnnnnnnnnnnnnnnnnnnnnnnnnnnnnnnnnnnnnnnnnnnnnnnnnnnnnnnnnnnnnnnnnnnnnnnnnnnnnnnnnnnnnnnnnnnnnnnnnnnnnnnnnnnnnnnnnnnnnnnnnnnnnnnnnnnnnnnnnnnnnnnnnnnnnnnnnnnnnnnnnnnnnnnnnnnnnnnnnnnnnnnnnnnnnnnnnnnnnnnnnnnnnnnnnnnnnnnnnnnnnnnnnnnnnnnnnnnnnnnnnnnnnnnnnnnnnnnnnnnnnnnnnnnnnnnnnnnnnnnnnnnnnnnnnnnnnnnnnnnnnnnnnnnnnnnnnnnnnnnnnnnnnnnnnnnnnnnnnnnnnnnnnnnnnnnnnnnnnnnnnnnnnnnnnnnnnnnnnnnnnnnnnnnnnnnnnnnnnnnnnnnnnnnnnnnnnnnnnnnnnnnnnnnnnnnnnnnnnnnnnnnnnnnnnnnnnnnnnnnnnnnnnnnnnnnnnnnnnnnnnnnnnnnnnnnnnnnnnnnnnnnnnnnnnnnnnnnnnnnnnnnnnnnnnnnnnnnnnnnnnnnnnnnnnnnnnnnnnnnnnnnnnnnnnnnnnnnnnnnnnnnnnnnnnnnnnnnnnnnnnnnnnnnnnnnnnnnnnnnnnnnnnnnnnnnnnnnnnnnnnnnnnnnnnnnnnnnnnnnnnnnnnnnnnnnnnnnnnnnnnnnnnnnnnnnnnnnnnnnnnnnnnnnnnnnnnnnnnnnnnnnnnnnnnnnnnnnnnnnnnnnnnnnnnnnnnnnnnnnnnnnnnnnnnnnnnnnnnnnnnnnnnnnnnnnnnnnnnnnnnnnnnnnnnnnnnnnnnnnnnnnnnnnnnnnnnnnnnnnnnnnnnnnnnnnnnnnnnnnnnnnnnnnnnnnnnnnnnnnnnnnnnnnnnnnnnnnnnnnnnnnnnnnnnnnnnnnnnnnnnnnnnnnnnnnnnnnnnnnnnnnnnnnnnnnnnnnnnnnnnnnnnnnnnnnnnnnnnnnnnnnnnnnnnnnnnnnnnnnnnnnnnnnnnnnnnnnnnnnnnnnnnnnnnnnnnnnnnnnnnnnnnnnnnnnnnnnnnnnnnnnnnnnnnnnnnnnnnnnnnnnnnnnnnnnnnnnnnnnnnnnnnnnnnnnnnnnnnnnnnnnnnnnnnnnnnnnnnnnnnnnnnnnnnnnnnnnnnnnnnnnnnnnnnnnnnnnnnnnnnnnnnnnnnnnnnnnnnnnnnnnnnnnnnnnnnnnnnnnnnnnnnnnnnnnnnnnnnnnnnnnnnnnnnnnnnnnnnnnnnnnnnnnnnnnnnnnnnnnnnnnnnnnnnnnnnnnnnnnnnnnnnnnnnnnnnnnnnnnnnnnnnnnnnnnnnnnnnnnnnnnnnnnnnnnnnnnnnnnnnnnnnnnnnnnnnnnnnnnnnnnnnnnnnnnnnnnnnnnnnnnnnnnnnnnnnnnnnnnnnnnnnnnnnnnnnnnnnnnnnnnnnnnnnnnnnnnnnnnnnnnnnnnnnnnnnnnnnnnnnnnnnnnnnnnnnnnnnnnnnnnnnnnnnnnnnnnnnnnnnnnnnnnnnnnnnnnnnnnnnnnnnnnnnnnnnnnnnnnnnnnnnnnnnnnnnnnnnnnnnnnnnnnnnnnnnnnnnnnnnnnnnnnnnnnnnnnnnnnnnnnnnnnnnnnnnnnnnnnnnnnnnnnnnnnnnnnnnnnnnnnnnnnnnnnnnnnnnnnnnnnnnnnnnnnnnnnnnnnnnnnnnnnnnnnnnnnnnnnnnnnnnnnnnnnnnnnnnnnnnnnnnnnnnnnnnnnnnnnnnnnnnnnnnnnnnnnnnnnnnnnnnnnnnnnnnnnnnnnnnnnnnnnnnnnnnnnnnnnnnnnnnnnnnnnnnnnnnnnnnnnnnnnnnnnnnnnnnnnnnnnnnnnnnnnnnnnnnnnnnnnnnnnnnnnnnnnnnnnnnnnnnnnnnnnnnnnnnnnnnnnnnnnnnnnnnnnnnnnnnnnnnnnnnnnnnnnnnnnnnnnnnnnnnnnnnnnnnnnnnnnnnnnnnnnnnnnnnnnnnnnnnnnnnnnnnnnnnnnnnnnnnnnnnnnnnnnnnnnnnnnnnnnnnnnnnnnnnnnnnnnnnnnnnnnnnnnnnnnnnnnnnnnnnnnnnnnnnnnnnnnnnnnnnnnnnnnnnnnnnnnnnnnnnnnnnnnnnnnnnnnnnnnnnnnnnnnnnnnnnnnnnnnnnnnnnnnnnnnnnnnnnnnnnnnnnnnnnnnnnnnnnnnnnnnnnnnnnnnnnnnnnnnnnnnnnnnnnnnnnnnnnnnnnnnnnnnnnnnnnnnnnnnnnnnnnnnnnnnnnnnnnnnnnnnnnnnnnnnnnnnnnnnnnnnnnnnnnnnnnnnnnnnnnnnnnnnnnnnnnnnnnnnnnnnnnnnnnnnnnnnnnnnnnnnnnnnnnnnnnnnnnnnnnnnnnnnnnnnnnnnnnnnnnnnnnnnnnnnnnnnnnnnnnnnnnnnnnnnnnnnnnnnnnnnnnnnnnnnnnnnnnnnnnnnnnnnnnnnnnnnnnnnnnnnnnnnnnnnnnnnnnnnnnnnnnnnnnnnnnnnnnnnnnnnnnnnnnnnnnnnnnnnnnnnnnnnnnnnnnnnnnnnnnnnnnnnnnnnnnnnnnnnnnnnnnnnnnnnnnnnnnnnnnnnnnnnnnnnnnnnnnnnnnnnnnnnnnnnnnnnnnnnnnnnnnnnnnnnnnnnnnnnnnnnnnnnnnnnnnnnnnnnnnnnnnnnnnnnnnnnnnnnnnnnnnnnnnnnnnnnnnnnnnnnnnnnnnnnnnnnnnnnnnnnnnnnnnnnnnnnnnnnnnnnnnnnnnnnnnnnnnnnnnnnnnnnnnnnnnnnnnnnnnnnnnnnnnnnnnnnnnnnnnnnnnnnnnnnnnnnnnnnnnnnnnnnnnnnnnnnnnnnnnnnnnnnnnnnnnnnnnnnnnnnnnnnnnnnnnnnnnnnnnnnnnnnnnnnnnnnnnnnnnnnnnnnnnnnnnnnnnnnnnnnnnnnnnnnnnnnnnnnnnnnnnnnnnnnnnnnnnnnnnnnnnnnnnnnnnnnnnnnnnnnnnnnnnnnnnnnnnnnnnnnnnnnnnnnnnnnnnnnnnnnnnnnnnnnnnnnnnnnnnnnnnnnnnnnnnnnnnnnnnnnnnnnnnnnnnnnnnnnnnnnnnnnnnnnnnnnnnnnnnnnnnnnnnnnnnnnnnnnnnnnnnnnnnnnnnnnnnnnnnnnnnnnnnnnnnnnnnnnnnnnnnnnnnnnnnnnnnnnnnnnnnnnnnnnnnnnnnnnnnnnnnnnnnnnnnnnnnnnnnnnnnnnnnnnnnnnnnnnnnnnnnnnnnnnnnnnnnnnnnnnnnnnnnnnnnnnnnnnnnnnnnnnnnnnnnnnnnnnnnnnnnnnnnnnnnnnnnnnnnnnnnnnnnnnnnnnnnnnnnnnnnnnnnnnnnnnnnnnnnnnnnnnnnnnnnnnnnnnnnnnnnnnnnnnnnnnnnnnnnnnnnnnnnnnnnnnnnnnnnnnnnnnnnnnnnnnnnnnnnnnnnnnnnnnnnnnnnnnnnnnnnnnnnnnnnnnnnnnnnnnnnnnnnnnnnnnnnnnnnnnnnnnnnnnnnnnnnnnnnnnnnnnnnnnnnnnnnnnnnnnnnnnnnnnnnnnnnnnnnnnnnnnnnnnnnnnnnnnnnnnnnnnnnnnnnnnnnnnnnnnnnnnnnnnnnnnnnnnnnnnnnnnnnnnnnnnnnnnnnnnnnnnnnnnnnnnnnnnnnnnnnnnnnnnnnnnnnnnnnnnnnnnnnnnnnnnnnnnnnnnnnnnnnnnnnnnnnnnnnnnnnnnnnnnnnnnnnnnnnnnnnnnnnnnnnnnnnnnnnnnnnnnnnnnnnnnnnnnnnnnnnnnnnnnnnnnnnnnnnnnnnnnnnnnnnnnnnnnnnnnnnnnnnnnnnnnnnnnnnnnnnnnnnnnnnnnnnnnnnnnnnnnnnnnnnnnnnnnnnnnnnnnnnnnnnnnnnnnnnnnnnnnnnnnnnnnnnnnnnnnnnnnnnnnnnnnnnnnnnnnnnnnnnnnnnnnnnnnnnnnnnnnnnnnnnnnnnnnnnnnnnnnnnnnnnnnnnnnnnnnnnnnnnnnnnnnnnnnnnnnnnnnnnnnnnnnnnnnnnnnnnnnnnnnnnnnnnnnnnnnnnnnnnnnnnnnnnnnnnnnnnnnnnnnnnnnnnnnnnnnnnnnnnnnnnnnnnnnnnnnnnnnnnnnnnnnnnnnnnnnnnnnnnnnnnnnnnnnnnnnnnnnnnnnnnnnnnnnnnnnnnnnnnnnnnnnnnnnnnnnnnnnnnnnnnnnnnnnnnnnnnnnnnnnnnnnnnnnnnnnnnnnnnnnnnnnnnnnnnnnnnnnnnnnnnnnnnnnnnnnnnnnnnnnnnnnnnnnnnnnnnnnnnnnnnnnnnnnnnnnnnnnnnnnnnnnnnnnnnnnnnnnnnnnnnnnnnnnnnnnnnnnnnnnnnnnnnnnnnnnnnnnnnnnnnnnnnnnnnnnnnnnnnnnnnnnnnnnnnnnnnnnnnnnnnnnnnnnnnnnnnnnnnnnnnnnnnnnnnnnnnnnnnnnnnnnnnnnnnnnnnnnnnnnnnnnnnnnnnnnnnnnnnnnnnnnnnnnnnnnnnnnnnnnnnnnnnnnnnnnnnnnnnnnnnnnnnnnnnnnnnnnnnnnnnnnnnnnnnnnnnnnnnnnnnnnnnnnnnnnnnnnnnnnnnnnnnnnnnnnnnnnnnnnnnnnnnnnnnnnnnnnnnnnnnnnnnnnnnnnnnnnnnnnnnnnnnnnnnnnnnnnnnnnnnnnnnnnnnnnnnnnnnnnnnnnnnnnnnnnnnnnnnnnnnnnnnnnnnnnnnnnnnnnnnnnnnnnnnnnnnnnnnnnnnnnnnnnnnnnnnnnnnnnnnnnnnnnnnnnnnnnnnnnnnnnnnnnnnnnnnnnnnnnnnnnnnnnnnnnnnnnnnnnnnnnnnnnnnnnnnnnnnnnnnnnnnnnnnnnnnnnnnnnnnnnnnnnnnnnnnnnnnnnnnnnnnnnnnnnnnnnnnnnnnnnnnnnnnnnnnnnnnnnnnnnnnnnnnnnnnnnnnnnnnnnnnnnnnnnnnnnnnnnnnnnnnnnnnnnnnnnnnnnnnnnnnnnnnnnnnnnnnnnnnnnnnnnnnnnnnnnnnnnnnnnnnnnnnnnnnnnnnnnnnnnnnnnnnnnnnnnnnnnnnnnnnnnnnnnnnnnnnnnnnnnnnnnnnnnnnnnnnnnnnnnnnnnnnnnnnnnnnnnnnnnnnnnnnnnnnnnnnnnnnnnnnnnnnnnnnnnnnnnnnnnnnnnnnnnnnnnnnnnnnnnnnnnnnnnnnnnnnnnnnnnnnnnnnnnnnnnnnnnnnnnnnnnnnnnnnnnnnnnnnnnnnnnnnnnnnnnnnnnnnnnnnnnnnnnnnnnnnnnnnnnnnnnnnnnnnnnnnnnnnnnnnnnnnnnnnnnnnnnnnnnnnnnnnnnnnnnnnnnnnnnnnnnnnnnnnnnnnnnnnnnnnnnnnnnnnnnnnnnnnnnnnnnnnnnnnnnnnnnnnnnnnnnnnnnnnnnnnnnnnnnnnnnnnnnnnnnnnnnnnnnnnnnnnnnnnnnnnnnnnnnnnnnnnnnnnnnnnnnnnnnnnnnnnnnnnnnnnnnnnnnnnnnnnnnnnnnnnnnnnnnnnnnnnnnnnnnnnnnnnnnnnnnnnnnnnnnnnnnnnnnnnnnnnnnnnnnnnnnnnnnnnnnnnnnnnnnnnnnnnnnnnnnnnnnnnnnnnnnnnnnnnnnnnnnnnnnnnnnnnnnnnnnnnnnnnnnnnnnnnnnnnnnnnnnnnnnnnnnnnnnnnnnnnnnnnnnnnnnnnnnnnnnnnnnnnnnnnnnnnnnnnnnnnnnnnnnnnnnnnnnnnnnnnnnnnnnnnnnnnnnnnnnnnnnnnnnnnnnnnnnnnnnnnnnnnnnnnnnnnnnnnnnnnnnnnnnnnnnnnnnnnnnnnnnnnnnnnnnnnnnnnnnnnnnnnnnnnnnnnnnnnnnnnnnnnnnnnnnnnnnnnnnnnnnnnnnnnnnnnnnnnnnnnnnnnnnnnnnnnnnnnnnnnnnnnnnnnnnnnnnnnnnnnnnnnnnnnnnnnnnnnnnnnnnnnnnnnnnnnnnnnnnnnnnnnnnnnnnnnnnnnnnnnnnnnnnnnnnnnnnnnnnnnnnnnnnnnnnnnnnnnnnnnnnnnnnnnnnnnnnnnnnnnnnnnnnnnnnnnnnnnnnnnnnnnnnnnnnnnnnnnnnnnnnnnnnnnnnnnnnnnnnnnnnnnnnnnnnnnnnnnnnnnnnnnnnnnnnnnnnnnnnnnnnnnnnnnnnnnnnnnnnnnnnnnnnnnnnnnnnnnnnnnnnnnnnnnnnnnnnnnnnnnnnnnnnnnnnnnnnnnnnnnnnnnnnnnnnnnnnnnnnnnnnnnnnnnnnnnnnnnnnnnnnnnnnnnnnnnnnnnnnnnnnnnnnnnnnnnnnnnnnnnnnnnnnnnnnnnnnnnnnnnnnnnnnnnnnnnnnnnnnnnnnnnnnnnnnnnnnnnnnnnnnnnnnnnnnnnnnnnnnnnnnnnnnnnnnnnnnnnnnnnnnnnnnnnnnnnnnnnnnnnnnnnnnnnnnnnnnnnnnnnnnnnnnnnnnnnnnnnnnnnnnnnnnnnnnnnnnnnnnnnnnnnnnnnnnnnnnnnnnnnnnnnnnnnnnnnnnnnnnnnnnnnnnnnnnnnnnnnnnnnnnnnnnnnnnnnnnnnnnnnnnnnnnnnnnnnnnnnnnnnnnnnnnnnnnnnnnnnnnnnnnnnnnnnnnnnnnnnnnnnnnnnnnnnnnnnnnnnnnnnnnnnnnnnnnnnnnnnnnnnnnnnnnnnnnnnnnnnnnnnnnnnnnnnnnnnnnnnnnnnnnnnnnnnnnnnnnnnnnnnnnnnnnnnnnnnnnnnnnnnnnnnnnnnnnnnnnnnnnnnnnnnnnnnnnnnnnnnnnnnnnnnnnnnnnnnnnnnnnnnnnnnnnnnnnnnnnnnnnnnnnnnnnnnnnnnnnnnnnnnnnnnnnnnnnnnnnnnnnnnnnnnnnnnnnnnnnnnnnnnnnnnnnnnnnnnnnnnnnnnnnnnnnnnnnnnnnnnnnnnnnnnnnnnnnnnnnnnnnnnnnnnnnnnnnnnnnnnnnnnnnnnnnnnnnnnnnnnnnnnnnnnnnnnnnnnnnnnnnnnnnnnnnnnnnnnnnnnnnnnnnnnnnnnnnnnnnnnnnnnnnnnnnnnnnnnnnnnnnnnnnnnnnnnnnnnnnnnnnnnnnnnnnnnnnnnnnnnnnnnnnnnnnnnnnnnnnnnnnnnnnnnnnnnnnnnnnnnnnnnnnnnnnnnnnnnnnnnnnnnnnnnnnnnnnnnnnnnnnnnnnnnnnnnnnnnnnnnnnnnnnnnnnnnnnnnnnnnnnnnnnnnnnnnnnnnnnnnnnnnnnnnnnnnnnnnnnnnnnnnnnnnnnnnnnnnnnnnnnnnnnnnnnnnnnnnnnnnnnnnnnnnnnnnnnnnnnnnnnnnnnnnnnnnnnnnnnnnnnnnnnnnnnnnnnnnnnnnnnnnnnnnnnnnnnnnnnnnnnnnnnnnnnnnnnnnnnnnnnnnnnnnnnnnnnnnnnnnnnnnnnnnnnnnnnnnnnnnnnnnnnnnnnnnnnnnnnnnnnnnnnnnnnnnnnnnnnnnnnnnnnnnnnnnnnnnnnnnnnnnnnnnnnnnnnnnnnnnnnnnnnnnnnnnnnnnnnnnnnnnnnnnnnnnnnnnnnnnnnnnnnnnnnnnnnnnnnnnnnnnnnnnnnnnnnnnnnnnnnnnnnnnnnnnnnnnnnnnnnnnnnnnnnnnnnnnnnnnnnnnnnnnnnnnnnnnnnnnnnnnnnnnnnnnnnnnnnnnnnnnnnnnnnnnnnnnnnnnnnnnnnnnnnnnnnnnnnnnnnnnnnnnnnnnnnnnnnnnnnnnnnnnnnnnnnnnnnnnnnnnnnnnnnnnnnnnnnnnnnnnnnnnnnnnnnnnnnnnnnnnnnnnnnnnnnnnnnnnnnnnnnnnnnnnnnnnnnnnnnnnnnnnnnnnnnnnnnnnnnnnnnnnnnnnnnnnnnnnnnnnnnnnnnnnnnnnnnnnnnnnnnnnnnnnnnnnnnnnnnnnnnnnnnnnnnnnnnnnnnnnnnnnnnnnnnnnnnnnnnnnnnnnnnnnnnnnnnnnnnnnnnnnnnnnnnnnnnnnnnnnnnnnnnnnnnnnnnnnnnnnnnnnnnnnnnnnnnnnnnnnnnnnnnnnnnnnnnnnnnnnnnnnnnnnnnnnnnnnnnnnnnnnnnnnnnnnnnnnnnnnnnnnnnnnnnnnnnnnnnnnnnnnnnnnnnnnnnnnnnnnnnnnnnnnnnnnnnnnnnnnnnnnnnnnnnnnnnnnnnnnnnnnnnnnnnnnnnnnnnnnnnnnnnnnnnnnnnnnnnnnnnnnnnnnnnnnnnnnnnnnnnnnnnnnnnnnnnnnnnnnnnnnnnnnnnnnnnnnnnnnnnnnnnnnnnnnnnnnnnnnnnnnnnnnnnnnnnnnnnnnnnnnnnnnnnnnnnnnnnnnnnnnnnnnnnnnnnnnnnnnnnnnnnnnnnnnnnnnnnnnnnnnnnnnnnnnnnnnnnnnnnnnnnnnnnnnnnnnnnnnnnnnnnnnnnnnnnnnnnnnnnnnnnnnnnnnnnnnnnnnnnnnnnnnnnnnnnnnnnnnnnnnnnnnnnnnnnnnnnnnnnnnnnnnnnnnnnnnnnnnnnnnnnnnnnnnnnnnnnnnnnnnnnnnnnnnnnnnnnnnnnnnnnnnnnnnnnnnnnnnnnnnnnnnnnnnnnnnnnnnnnnnnnnnnnnnnnnnnnnnnnnnnnnnnnnnnnnnnnnnnnnnnnnnnnnnnnnnnnnnnnnnnnnnnnnnnnnnnnnnnnnnnnnnnnnnnnnnnnnnnnnnnnnnnnnnnnnnnnnnnnnnnnnnnnnnnnnnnnnnnnnnnnnnnnnnnnnnnnnnnnnnnnnnnnnnnnnnnnnnnnnnnnnnnnnnnnnnnnnnnnnnnnnnnnnnnnnnnnnnnnnnnnnnnnnnnnnnnnnnnnnnnnnnnnnnnnnnnnnnnnnnnnnnnnnnnnnnnnnnnnnnnnnnnnnnnnnnnnnnnnnnnnnnnnnnnnnnnnnnnnnnnnnnnnnnnnnnnnnnnnnnnnnnnnnnnnnnnnnnnnnnnnnnnnnnnnnnnnnnnnnnnnnnnnnnnnnnnnnnnnnnnnnnnnnnnnnnnnnnnnnnnnnnnnnnnnnnnnnnnnnnnnnnnnnnnnnnnnnnnnnnnnnnnnnnnnnnnnnnnnnnnnnnnnnnnnnnnnnnnnnnnnnnnnnnnnnnnnnnnnnnnnnnnnnnnnnnnnnnnnnnnnnnnnnnnnnnnnnnnnnnnnnnnnnnnnnnnnnnnnnnnnnnnnnnnnnnnnnnnnnnnnnnnnnnnnnnnnnnnnnnnnnnnnnnnnnnnnnnnnnnnnnnnnnnnnnnnnnnnnnnnnnnnnnnnnnnnnnnnnnnnnnnnnnnnnnnnnnnnnnnnnnnnnnnnnnnnnnnnnnnnnnnnnnnnnnnnnnnnnnnnnnnnnnnnnnnnnnnnnnnnnnnnnnnnnnnnnnnnnnnnnnnnnnnnnnnnnnnnnnnnnnnnnnnnnnnnnnnnnnnnnnnnnnnnnnnnnnnnnnnnnnnnnnnnnnnnnnnnnnnnnnnnnnnnnnnnnnnnnnnnnnnnnnnnnnnnnnnnnnnnnnnnnnnnnnnnnnnnnnnnnnnnnnnnnnnnnnnnnnnnnnnnnnnnnnnnnnnnnnnnnnnnnnnnnnnnnnnnnnnnnnnnnnnnnnnnnnnnnnnnnnnnnnnnnnnnnnnnnnnnnnnnnnnnnnnnnnnnnnnnnnnnnnnnnnnnnnnnnnnnnnnnnnnnnnnnnnnnnnnnnnnnnnnnnnnnnnnnnnnnnnnnnnnnnnnnnnnnnnnnnnnnnnnnnnnnnnnnnnnnnnnnnnnnnnnnnnnnnnnnnnnnnnnnnnnnnnnnnnnnnnnnnnnnnnnnnnnnnnnnnnnnnnnnnnnnnnnnnnnnnnnnnnnnnnnnnnnnnnnnnnnnnnnnnnnnnnnnnnnnnnnnnnnnnnnnnnnnnnnnnnnnnnnnnnnnnnnnnnnnnnnnnnnnnnnnnnnnnnnnnnnnnnnnnnnnnnnnnnnnnnnnnnnnnnnnnnnnnnnnnnnnnnnnnnnnnnnnnnnnnnnnnnnnnnnnnnnnnnnnnnnnnnnnnnnnnnnnnnnnnnnnnnnnnnnnnnnnnnnnnnnnnnnnnnnnnnnnnnnnnnnnnnnnnnnnnnnnnnnnnnnnnnnnnnnnnnnnnnnnnnnnnnnnnnnnnnnnnnnnnnnnnnnnnnnnnnnnnnnnnnnnnnnnnnnnnnnnnnnnnnnnnnnnnnnnnnnnnnnnnnnnnnnnnnnnnnnnnnnnnnnnnnnnnnnnnnnnnnnnnnnnnnnnnnnnnnnnnnnnnnnnnnnnnnnnnnnnnnnnnnnnnnnnnnnnnnnnnnnnnnnnnnnnnnnnnnnnnnnnnnnnnnnnnnnnnnnnnnnnnnnnnnnnnnnnnnnnnnnnnnnnnnnnnnnnnnnnnnnnnnnnnnnnnnnnnnnnnnnnnnnnnnnnnnnnnnnnnnnnnnnnnnnnnnnnnnnnnnnnnnnnnnnnnnnnnnnnnnnnnnnnnnnnnnnnnnnnnnnnnnnnnnnnnnnnnnnnnnnnnnnnnnnnnnnnnnnnnnnnnnnnnnnnnnnnnnnnnnnnnnnnnnnnnnnnnnnnnnnnnnnnnnnnnnnnnnnnnnnnnnnnnnnnnnnnnnnnnnnnnnnnnnnnnnnnnnnnnnnnnnnnnnnnnnnnnnnnnnnnnnnnnnnnnnnnnnnnnnnnnnnnnnnnnnnnnnnnnnnnnnnnnnnnnnnnnnnnnnnnnnnnnnnnnnnnnnnnnnnnnnnnnnnnnnnnnnnnnnnnnnnnnnnnnnnnnnnnnnnnnnnnnnnnnnnnnnnnnnnnnnnnnnnnnnnnnnnnnnnnnnnnnnnnnnnnnnnnnnnnnnnnnnnnnnnnnnnnnnnnnnnnnnnnnnnnnnnnnnnnnnnnnnnnnnnnnnnnnnnnnnnnnnnnnnnnnnnnnnnnnnnnnnnnnnnnnnnnnnnnnnnnnnnnnnnnnnnnnnnnnnnnnnnnnnnnnnnnnnnnnnnnnnnnnnnnnnnnnnnnnnnnnnnnnnnnnnnnnnnnnnnnnnnnnnnnnnnnnnnnnnnnnnnnnnnnnnnnnnnnnnnnnnnnnnnnnnnnnnnnnnnnnnnnnnnnnnnnnnnnnnnnnnnnnnnnnnnnnnnnnnnnnnnnnnnnnnnnnnnnnnnnnnnnnnnnnnnnnnnnnnnnnnnnnnnnnnnnnnnnnnnnnnnnnnnnnnnnnnnnnnnnnnnnnnnnnnnnnnnnnnnnnnnnnnnnnnnnnnnnnnnnnnnnnnnnnnnnnnnnnnnnnnnnnnnnnnnnnnnnnnnnnnnnnnnnnnnnnnnnnnnnnnnnnnnnnnnnnnnnnnnnnnnnnnnnnnnnnnnnnnnnnnnnnnnnnnnnnnnnnnnnnnnnnnnnnnnnnnnnnnnnnnnnnnnnnnnnnnnnnnnnnnnnnnnnnnnnnnnnnnnnnnnnnnnnnnnnnnnnnnnnnnnnnnnnnnnnnnnnnnnnnnnnnnnnnnnnnnnnnnnnnnnnnnnnnnnnnnnnnnnnnnnnnnnnnnnnnnnnnnnnnnnnnnnnnnnnnnnnnnnnnnnnnnnnnnnnnnnnnnnnnnnnnnnnnnnnnnnnnnnnnnnnnnnnnnnnnnnnnnnnnnnnnnnnnnnnnnnnnnnnnnnnnnnnnnnnnnnnnnnnnnnnnnnnnnnnnnnnnnnnnnnnnnnnnnnnnnnnnnnnnnnnnnnnnnnnnnnnnnnnnnnnnnnnnnnnnnnnnnnnnnnnnnnnnnnnnnnnnnnnnnnnnnnnnnnnnnnnnnnnnnnnnnnnnnnnnnnnnnnnnnnnnnnnnnnnnnnnnnnnnnnnnnnnnnnnnnnnnnnnnnnnnnnnnnnnnnnnnnnnnnnnnnnnnnnnnnnnnnnnnnnnnnnnnnnnnnnnnnnnnnnnnnnnnnnnnnnnnnnnnnnnnnnnnnnnnnnnnnnnnnnnnnnnnnnnnnnnnnnnnnnnnnnnnnnnnnnnnnnnnnnnnnnnnnnnnnnnnnnnnnnnnnnnnnnnnnnnnnnnnnnnnnnnnnnnnnnnnnnnnnnnnnnnnnnnnnnnnnnnnnnnnnnnnnnnnnnnnnnnnnnnnnnnnnnnnnnnnnnnnnnnnnnnnnnnnnnnnnnnnnnnnnnnnnnnnnnnnnnnnnnnnnnnnnnnnnnnnnnnnnnnnnnnnnnnnnnnnnnnnnnnnnnnnnnnnnnnnnnnnnnnnnnnnnnnnnnnnnnnnnnnnnnnnnnnnnnnnnnnnnnnnnnnnnnnnnnnnnnnnnnnnnnnnnnnnnnnnnnnnnnnnnnnnnnnnnnnnnnnnnnnnnnnnnnnnnnnnnnnnnnnnnnnnnnnnnnnnnnnnnnnnnnnnnnnnnnnnnnnnnnnnnnnnnnnnnnnnnnnnnnnnnnnnnnnnnnnnnnnnnnnnnnnnnnnnnnnnnnnnnnnnnnnnnnnnnnnnnnnnnnnnnnnnnnnnnnnnnnnnnnnnnnnnnnnnnnnnnnnnnnnnnnnnnnnnnnnnnnnnnnnnnnnnnnnnnnnnnnnnnnnnnnnnnnnnnnnnnnnnnnnnnnnnnnnnnnnnnnnnnnnnnnnnnnnnnnnnnnnnnnnnnnnnnnnnnnnnnnnnnnnnnnnnnnnnnnnnnnnnnnnnnnnnnnnnnnnnnnnnnnnnnnnnnnnnnnnnnnnnnnnnnnnnnnnnnnnnnnnnnnnnnnnnnnnnnnnnnnnnnnnnnnnnnnnnnnnnnnnnnnnnnnnnnnnnnnnnnnnnnnnnnnnnnnnnnnnnnnnnnnnnnnnnnnnnnnnnnnnnnnnnnnnnnnnnnnnnnnnnnnnnnnnnnnnnnnnnnnnnnnnnnnnnnnnnnnnnnnnnnnnnnnnnnnnnnnnnnnnnnnnnnnnnnnnnnnnnnnnnnnnnnnnnnnnnnnnnnnnnnnnnnnnnnnnnnnnnnnnnnnnnnnnnnnnnnnnnnnnnnnnnnnnnnnnnnnnnnnnnnnnnnnnnnnnnnnnnnnnnnnnnnnnnnnnnnnnnnnnnnnnnnnnnnnnnnnnnnnnnnnnnnnnnnnnnnnnnnnnnnnnnnnnnnnnnnnnnnnnnnnnnnnnnnnnnnnnnnnnnnnnnnnnnnnnnnnnnnnnnnnnnnnnnnnnnnnnnnnnnnnnnnnnnnnnnnnnnnnnnnnnnnnnnnnnnnnnnnnnnnnnnnnnnnnnnnnnnnnnnnnnnnnnnnnnnnnnnnnnnnnnnnnnnnnnnnnnnnnnnnnnnnnnnnnnnnnnnnnnnnnnnnnnnnnnnnnnnnnnnnnnnnnnnnnnnnnnnnnnnnnnnnnnnnnnnnnnnnnnnnnnnnnnnnnnnnnnnnnnnnnnnnnnnnnnnnnnnnnnnnnnnnnnnnnnnnnnnnnnnnnnnnnnnnnnnnnnnnnnnnnnnnnnnnnnnnnnnnnnnnnnnnnnnnnnnnnnnnnnnnnnnnnnnnnnnnnnnnnnnnnnnnnnnnnnnnnnnnnnnnnnnnnnnnnnnnnnnnnnnnnnnnnnnnnnnnnnnnnnnnnnnnnnnnnnnnnnnnnnnnnnnnnnnnnnnnnnnnnnnnnnnnnnnnnnnnnnnnnnnnnnnnnnnnnnnnnnnnnnnnnnnnnnnnnnnnnnnnnnnnnnnnnnnnnnnnnnnnnnnnnnnnnnnnnnnnnnnnnnnnnnnnnnnnnnnnnnnnnnnnnnnnnnnnnnnnnnnnnnnnnnnnnnnnnnnnnnnnnnnnnnnnnnnnnnnnnnnnnnnnnnnnnnnnnnnnnnnnnnnnnnnnnnnnnnnnnnnnnnnnnnnnnnnnnnnnnnnnnnnnnnnnnnnnnnnnnnnnnnnnnnnnnnnnnnnnnnnnnnnnnnnnnnnnnnnnnnnnnnnnnnnnnnnnnnnnnnnnnnnnnnnnnnnnnnnnnnnnnnnnnnnnnnnnnnnnnnnnnnnnnnnnnnnnnnnnnnnnnnnnnnnnnnnnnnnnnnnnnnnnnnnnnnnnnnnnnnnnnnnnnnnnnnnnnnnnnnnnnnnnnnnnnnnnnnnnnnnnnnnnnnnnnnnnnnnnnnnnnnnnnnnnnnnnnnnnnnnnnnnnnnnnnnnnnnnnnnnnnnnnnnnnnnnnnnnnnnnnnnnnnnnnnnnnnnnnnnnnnnnnnnnnnnnnnnnnnnnnnnnnnnnnnnnnnnnnnnnnnnnnnnnnnnnnnnnnnnnnnnnnnnnnnnnnnnnnnnnnnnnnnnnnnnnnnnnnnnnnnnnnnnnnnnnnnnnnnnnnnnnnnnnnnnnnnnnnnnnnnnnnnnnnnnnnnnnnnnnnnnnnnnnnnnnnnnnnnnnnnnnnnnnnnnnnnnnnnnnnnnnnnnnnnnnnnnnnnnnnnnnnnnnnnnnnnnnnnnnnnnnnnnnnnnnnnnnnnnnnnnnnnnnnnnnnnnnnnnnnnnnnnnnnnnnnnnnnnnnnnnnnnnnnnnnnnnnnnnnnnnnnnnnnnnnnnnnnnnnnnnnnnnnnnnnnnnnnnnnnnnnnnnnnnnnnnnnnnnnnnnnnnnnnnnnnnnnnnnnnnnnnnnnnnnnnnnnnnnnnnnnnnnnnnnnnnnnnnnnnnnnnnnnnnnnnnnnnnnnnnnnnnnnnnnnnnnnnnnnnnnnnnnnnnnnnnnnnnnnnnnnnnnnnnnnnnnnnnnnnnnnnnnnnnnnnnnnnnnnnnnnnnnnnnnnnnnnnnnnnnnnnnnnnnnnnnnnnnnnnnnnnnnnnnnnnnnnnnnnnnnnnnnnnnnnnnnnnnnnnnnnnnnnnnnnnnnnnnnnnnnnnnnnnnnnnnnnnnnnnnnnnnnnnnnnnnnnnnnnnnnnnnnnnnnnnnnnnnnnnnnnnnnnnnnnnnnnnnnnnnnnnnnnnnnnnnnnnnnnnnnnnnnnnnnnnnnnnnnnnnnnnnnnnnnnnnnnnnnnnnnnnnnnnnnnnnnnnnnnnnnnnnnnnnnnnnnnnnnnnnnnnnnnnnnnnnnnnnnnnnnnnnnnnnnnnnnnnnnnnnnnnnnnnnnnnnnnnnnnnnnnnnnnnnnnnnnnnnnnnnnnnnnnnnnnnnnnnnnnnnnnnnnnnnnnnnnnnnnnnnnnnnnnnnnnnnnnnnnnnnnnnnnnnnnnnnnnnnnnnnnnnnnnnnnnnnnnnnnnnnnnnnnnnnnnnnnnnnnnnnnnnnnnnnnnnnnnnnnnnnnnnnnnnnnnnnnnnnnnnnnnnnnnnnnnnnnnnnnnnnnnnnnnnnnnnnnnnnnnnnnnnnnnnnnnnnnnnnnnnnnnnnnnnnnnnnnnnnnnnnnnnnnnnnnnnnnnnnnnnnnnnnnnnnnnnnnnnnnnnnnnnnnnnnnnnnnnnnnnnnnnnnnnnnnnnnnnnnnnnnnnnnnnnnnnnnnnnnnnnnnnnnnnnnnnnnnnnnnnnnnnnnnnnnnnnnnnnnnnnnnnnnnnnnnnnnnnnnnnnnnnnnnnnnnnnnnnnnnnnnnnnnnnnnnnnnnnnnnnnnnnnnnnnnnnnnnnnnnnnnnnnnnnnnnnnnnnnnnnnnnnnnnnnnnnnnnnnnnnnnnnnnnnnnnnnnnnnnnnnnnnnnnnnnnnnnnnnnnnnnnnnnnnnnnnnnnnnnnnnnnnnnnnnnnnnnnnnnnnnnnnnnnnnnnnnnnnnnnnnnnnnnnnnnnnnnnnnnnnnnnnnnnnnnnnnnnnnnnnnnnnnnnnnnnnnnnnnnnnnnnnnnnnnnnnnnnnnnnnnnnnnnnnnnnnnnnnnnnnnnnnnnnnnnnnnnnnnnnnnnnnnnnnnnnnnnnnnnnnnnnnnnnnnnnnnnnnnnnnnnnnnnnnnnnnnnnnnnnnnnnnnnnnnnnnnnnnnnnnnnnnnnnnnnnnnnnnnnnnnnnnnnnnnnnnnnnnnnnnnnnnnnnnnnnnnnnnnnnnnnnnnnnnnnnnnnnnnnnnnnnnnnnnnnnnnnnnnnnnnnnnnnnnnnnnnnnnnnnnnnnnnnnnnnnnnnnnnnnnnnnnnnnnnnnnnnnnnnnnnnnnnnnnnnnnnnnnnnnnnnnnnnnnnnnnnnnnnnnnnnnnnnnnnnnnnnnnnnnnnnnnnnnnnnnnnnnnnnnnnnnnnnnnnnnnnnnnnnnnnnnnnnnnnnnnnnnnnnnnnnnnnnnnnnnnnnnnnnnnnnnnnnnnnnnnnnnnnnnnnnnnnnnnnnnnnnnnnnnnnnnnnnnnnnnnnnnnnnnnnnnnnnnnnnnnnnnnnnnnnnnnnnnnnnnnnnnnnnnnnnnnnnnnnnnnnnnnnnnnnnnnnnnnnnnnnnnnnnnnnnnnnnnnnnnnnnnnnnnnnnnnnnnnnnnnnnnnnnnnnnnnnnnnnnnnnnnnnnnnnnnnnnnnnnnnnnnnnnnnnnnnnnnnnnnnnnnnnnnnnnnnnnnnnnnnnnnnnnnnnnnnnnnnnnnnnnnnnnnnnnnnnnnnnnnnnnnnnnnnnnnnnnnnnnnnnnnnnnnnnnnnnnnnnnnnnnnnnnnnnnnnnnnnnnnnnnnnnnnnnnnnnnnnnnnnnnnnnnnnnnnnnnnnnnnnnnnnnnnnnnnnnnnnnnnnnnnnnnnnnnnnnnnnnnnnnnnnnnnnnnnnnnnnnnnnnnnnnnnnnnnnnnnnnnnnnnnnnnnnnnnnnnnnnnnnnnnnnnnnnnnnnnnnnnnnnnnnnnnnnnnnnnnnnnnnnnnnnnnnnnnnnnnnnnnnnnnnnnnnnnnnnnnnnnnnnnnnnnnnnnnnnnnnnnnnnnnnnnnnnnnnnnnnnnnnnnnnnnnnnnnnnnnnnnnnnnnnnnnnnnnnnnnnnnnnnnnnnnnnnnnnnnnnnnnnnnnnnnnnnnnnnnnnnnnnnnnnnnnnnnnnnnnnnnnnnnnnnnnnnnnnnnnnnnnnnnnnnnnnnnnnnnnnnnnnnnnnnnnnnnnnnnnnnnnnnnnnnnnnnnnnnnnnnnnnnnnnnnnnnnnnnnnnnnnnnnnnnnnnnnnnnnnnnnnnnnnnnnnnnnnnnnnnnnnnnnnnnnnnnnnnnnnnnnnnnnnnnnnnnnnnnnnnnnnnnnnnnnnnnnnnnnnnnnnnnnnnnnnnnnnnnnnnnnnnnnnnnnnnnnnnnnnnnnnnnnnnnnnnnnnnnnnnnnnnnnnnnnnnnnnnnnnnnnnnnnnnnnnnnnnnnnnnnnnnnnnnnnnnnnnnnnnnnnnnnnnnnnnnnnnnnnnnnnnnnnnnnnnnnnnnnnnnnnnnnnnnnnnnnnnnnnnnnnnnnnnnnnnnnnnnnnnnnnnnnnnnnnnnnnnnnnnnnnnnnnnnnnnnnnnnnnnnnnnnnnnnnnnnnnnnnnnnnnnnnnnnnnnnnnnnnnnnnnnnnnnnnnnnnnnnnnnnnnnnnnnnnnnnnnnnnnnnnnnnnnnnnnnnnnnnnnnnnnnnnnnnnnnnnnnnnnnnnnnnnnnnnnnnnnnnnnnnnnnnnnnnnnnnnnnnnnnnnnnnnnnnnnnnnnnnnnnnnnnnnnnnnnnnnnnnnnnnnnnnnnnnnnnnnnnnnnnnnnnnnnnnnnnnnnnnnnnnnnnnnnnnnnnnnnnnnnnnnnnnnnnnnnnnnnnnnnnnnnnnnnnnnnnnnnnnnnnnnnnnnnnnnnnnnnnnnnnnnnnnnnnnnnnnnnnnnnnnnnnnnnnnnnnnnnnnnnnnnnnnnnnnnnnnnnnnnnnnnnnnnnnnnnnnnnnnnnnnnnnnnnnnnnnnnnnnnnnnnnnnnnnnnnnnnnnnnnnnnnnnnnnnnnnnnnnnnnnnnnnnnnnnnnnnnnnnnnnnnnnnnnnnnnnnnnnnnnnnnnnnnnnnnnnnnnnnnnnnnnnnnnnnnnnnnnnnnnnnnnnnnnnnnnnnnnnnnnnnnnnnnnnnnnnnnnnnnnnnnnnnnnnnnnnnnnnnnnnnnnnnnnnnnnnnnnnnnnnnnnnnnnnnnnnnnnnnnnnnnnnnnnnnnnnnnnnnnnnnnnnnnnnnnnnnnnnnnnnnnnnnnnnnnnnnnnnnnnnnnnnnnnnnnnnnnnnnnnnnnnnnnnnnnnnnnnnnnnnnnnnnnnnnnnnnnnnnnnnnnnnnnnnnnnnnnnnnnnnnnnnnnnnnnnnnnnnnnnnnnnnnnnnnnnnnnnnnnnnnnnnnnnnnnnnnnnnnnnnnnnnnnnnnnnnnnnnnnnnnnnnnnnnnnnnnnnnnnnnnnnnnnnnnnnnnnnnnnnnnnnnnnnnnnnnnnnnnnnnnnnnnnnnnnnnnnnnnnnnnnnnnnnnnnnnnnnnnnnnnnnnnnnnnnnnnnnnnnnnnnnnnnnnnnnnnnnnnnnnnnnnnnnnnnnnnnnnnnnnnnnnnnnnnnnnnnnnnnnnnnnnnnnnnnnnnnnnnnnnnnnnnnnnnnnnnnnnnnnnnnnnnnnnnnnnnnnnnnnnnnnnnnnnnnnnnnnnnnnnnnnnnnnnnnnnnnnnnnnnnnnnnnnnnnnnnnnnnnnnnnnnnnnnnnnnnnnnnnnnnnnnnnnnnnnnnnnnnnnnnnnnnnnnnnnnnnnnnnnnnnnnnnnnnnnnnnnnnnnnnnnnnnnnnnnnnnnnnnnnnnnnnnnnnnnnnnnnnnnnnnnnnnnnnnnnnnnnnnnnnnnnnnnnnnnnnnnnnnnnnnnnnnnnnnnnnnnnnnnnnnnnnnnnnnnnnnnnnnnnnnnnnnnnnnnnnnnnnnnnnnnnnnnnnnnnnnnnnnnnnnnnnnnnnnnnnnnnnnnnnnnnnnnnnnnnnnnnnnnnnnnnnnnnnnnnnnnnnnnnnnnnnnnnnnnnnnnnnnnnnnnnnnnnnnnnnnnnnnnnnnnnnnnnnnnnnnnnnnnnnnnnnnnnnnnnnnnnnnnnnnnnnnnnnnnnnnnnnnnnnnnnnnnnnnnnnnnnnnnnnnnnnnnnnnnnnnnnnnnnnnnnnnnnnnnnnnnnnnnnnnnnnnnnnnnnnnnnnnnnnnnnnnnnnnnnnnnnnnnnnnnnnnnnnnnnnnnnnnnnnnnnnnnnnnnnnnnnnnnnnnnnnnnnnnnnnnnnnnnnnnnnnnnnnnnnnnnnnnnnnnnnnnnnnnnnnnnnnnnnnnnnnnnnnnnnnnnnnnnnnnnnnnnnnnnnnnnnnnnnnnnnnnnnnnnnnnnnnnnnnnnnnnnnnnnnnnnnnnnnnnnnnnnnnnnnnnnnnnnnnnnnnnnnnnnnnnnnnnnnnnnnnnnnnnnnnnnnnnnnnnnnnnnnnnnnnnnnnnnnnnnnnnnnnnnnnnnnnnnnnnnnnnnnnnnnnnnnnnnnnnnnnnnnnnnnnnnnnnnnnnnnnnnnnnnnnnnnnnnnnnnnnnnnnnnnnnnnnnnnnnnnnnnnnnnnnnnnnnnnnnnnnnnnnnnnnnnnnnnnnnnnnnnnnnnnnnnnnnnnnnnnnnnnnnnnnnnnnnnnnnnnnnnnnnnnnnnnnnnnnnnnnnnnnnnnnnnnnnnnnnnnnnnnnnnnnnnnnnnnnnnnnnnnnnnnnnnnnnnnnnnnnnnnnnnnnnnnnnnnnnnnnnnnnnnnnnnnnnnnnnnnnnnnnnnnnnnnnnnnnnnnnnnnnnnnnnnnnnnnnnnnnnnnnnnnnnnnnnnnnnnnnnnnnnnnnnnnnnnnnnnnnnnnnnnnnnnnnnnnnnnnnnnnnnnnnnnnnnnnnnnnnnnnnnnnnnnnnnnnnnnnnnnnnnnnnnnnnnnnnnnnnnnnnnnnnnnnnnnnnnnnnnnnnnnnnnnnnnnnnnnnnnnnnnnnnnnnnnnnnnnnnnnnnnnnnnnnnnnnnnnnnnnnnnnnnnnnnnnnnnnnnnnnnnnnnnnnnnnnnnnnnnnnnnnnnnnnnnnnnnnnnnnnnnnnnnnnnnnnnnnnnnnnnnnnnnnnnnnnnnnnnnnnnnnnnnnnnnnnnnnnnnnnnnnnnnnnnnnnnnnnnnnnnnnnnnnnnnnnnnnnnnnnnnnnnnnnnnnnnnnnnnnnnnnnnnnnnnnnnnnnnnnnnnnnnnnnnnnnnnnnnnnnnnnnnnnnnnnnnnnnnnnnnnnnnnnnnnnnnnnnnnnnnnnnnnnnnnnnnnnnnnnnnnnnnnnnnnnnnnnnnnnnnnnnnnnnnnnnnnnnnnnnnnnnnnnnnnnnnnnnnnnnnnnnnnnnnnnnnnnnnnnnnnnnnnnnnnnnnnnnnnnnnnnnnnnnnnnnnnnnnnnnnnnnnnnnnnnnnnnnnnnnnnnnnnnnnnnnnnnnnnnnnnnnnnnnnnnnnnnnnnnnnnnnnnnnnnnnnnnnnnnnnnnnnnnnnnnnnnnnnnnnnnnnnnnnnnnnnnnnnnnnnnnnnnnnnnnnnnnnnnnnnnnnnnnnnnnnnnnnnnnnnnnnnnnnnnnnnnnnnnnnnnnnnnnnnnnnnnnnnnnnnnnnnnnnnnnnnnnnnnnnnnnnnnnnnnnnnnnnnnnnnnnnnnnnnnnnnnnnnnnnnnnnnnnnnnnnnnnnnnnnnnnnnnnnnnnnnnnnnnnnnnnnnnnnnnnnnnnnnnnnnnnnnnnnnnnnnnnnnnnnnnnnnnnnnnnnnnnnnnnnnnnnnnnnnnnnnnnnnnnnnnnnnnnnnnnnnnnnnnnnnnnnnnnnnnnnnnnnnnnnnnnnnnnnnnnnnnnnnnnnnnnnnnnnnnnnnnnnnnnnnnnnnnnnnnnnnnnnnnnnnnnnnnnnnnnnnnnnnnnnnnnnnnnnnnnnnnnnnnnnnnnnnnnnnnnnnnnnnnnnnnnnnnnnnnnnnnnnnnnnnnnnnnnnnnnnnnnnnnnnnnnnnnnnnnnnnnnnnnnnnnnnnnnnnnnnnnnnnnnnnnnnnnnnnnnnnnnnnnnnnnnnnnnnnnnnnnnnnnnnnnnnnnnnnnnnnnnnnnnnnnnnnnnnnnnnnnnnnnnnnnnnnnnnnnnnnnnnnnnnnnnnnnnnnnnnnnnnnnnnnnnnnnnnnnnnnnnnnnnnnnnnnnnnnnnnnnnnnnnnnnnnnnnnnnnnnnnnnnnnnnnnnnnnnnnnnnnnnnnnnnnnnnnnnnnnnnnnnnnnnnnnnnnnnnnnnnnnnnnnnnnnnnnnnnnnnnnnnnnnnnnnnnnnnnnnnnnnnnnnnnnnnnnnnnnnnnnnnnnnnnnnnnnnnnnnnnnnnnnnnnnnnnnnnnnnnnnnnnnnnnnnnnnnnnnnnnnnnnnnnnnnnnnnnnnnnnnnnnnnnnnnnnnnnnnnnnnnnnnnnnnnnnnnnnnnnnnnnnnnnnnnnnnnnnnnnnnnnnnnnnnnnnnnnnnnnnnnnnnnnnnnnnnnnnnnnnnnnnnnnnnnnnnnnnnnnnnnnnnnnnnnnnnnnnnnnnnnnnnnnnnnnnnnnnnnnnnnnnnnnnnnnnnnnnnnnnnnnnnnnnnnnnnnnnnnnnnnnnnnnnnnnnnnnnnnnnnnnnnnnnnnnnnnnnnnnnnnnnnnnnnnnnnnnnnnnnnnnnnnnnnnnnnnnnnnnnnnnnnnnnnnnnnnnnnnnnnnnnnnnnnnnnnnnnnnnnnnnnnnnnnnnnnnnnnnnnnnnnnnnnnnnnnnnnnnnnnnnnnnnnnnnnnnnnnnnnnnnnnnnnnnnnnnnnnnnnnnnnnnnnnnnnnnnnnnnnnnnnnnnnnnnnnnnnnnnnnnnnnnnnnnnnnnnnnnnnnnnnnnnnnnnnnnnnnnnnnnnnnnnnnnnnnnnnnnnnnnnnnnnnnnnnnnnnnnnnnnnnnnnnnnnnnnnnnnnnnnnnnnnnnnnnnnnnnnnnnnnnnnnnnnnnnnnnnnnnnnnnnnnnnnnnnnnnnnnnnnnnnnnnnnnnnnnnnnnnnnnnnnnnnnnnnnnnnnnnnnnnnnnnnnnnnnnnnnnnnnnnnnnnnnnnnnnnnnnnnnnnnnnnnnnnnnnnnnnnnnnnnnnnnnnnnnnnnnnnnnnnnnnnnnnnnnnnnnnnnnnnnnnnnnnnnnnnnnnnnnnnnnnnnnnnnnnnnnnnnnnnnnnnnnnnnnnnnnnnnnnnnnnnnnnnnnnnnnnnnnnnnnnnnnnnnnnnnnnnnnnnnnnnnnnnnnnnnnnnnnnnnnnnnnnnnnnnnnnnnnnnnnnnnnnnnnnnnnnnnnnnnnnnnnnnnnnnnnnnnnnnnnnnnnnnnnnnnnnnnnnnnnnnnnnnnnnnnnnnnnnnnnnnnnnnnnnnnnnnnnnnnnnnnnnnnnnnnnnnnnnnnnnnnnnnnnnnnnnnnnnnnnnnnnnnnnnnnnnnnnnnnnnnnnnnnnnnnnnnnnnnnnnnnnnnnnnnnnnnnnnnnnnnnnnnnnnnnnnnnnnnnnnnnnnnnnnnnnnnnnnnnnnnnnnnnnnnnnnnnnnnnnnnnnnnnnnnnnnnnnnnnnnnnnnnnnnnnnnnnnnnnnnnnnnnnnnnnnnnnnnnnnnnnnnnnnnnnnnnnnnnnnnnnnnnnnnnnnnnnnnnnnnnnnnnnnnnnnnnnnnnnnnnnnnnnnnnnnnnnnnnnnnnnnnnnnnnnnnnnnnnnnnnnnnnnnnnnnnnnnnnnnnnnnnnnnnnnnnnnnnnnnnnnnnnnnnnnnnnnnnnnnnnnnnnnnnnnnnnnnnnnnnnnnnnnnnnnnnnnnnnnnnnnnnnnnnnnnnnnnnnnnnnnnnnnnnnnnnnnnnnnnnnnnnnnnnnnnnnnnnnnnnnnnnnnnnnnnnnnnnnnnnnnnnnnnnnnnnnnnnnnnnnnnnnnnnnnnnnnnnnnnnnnnnnnnnnnnnnnnnnnnnnnnnnnnnnnnnnnnnnnnnnnnnnnnnnnnnnnnnnnnnnnnnnnnnnnnnnnnnnnnnnnnnnnnnnnnnnnnnnnnnnnnnnnnnnnnnnnnnnnnnnnnnnnnnnnnnnnnnnnnnnnnnnnnnnnnnnnnnnnnnnnnnnnnnnnnnnnnnnnnnnnnnnnnnnnnnnnnnnnnnnnnnnnnnnnnnnnnnnnnnnnnnnnnnnnnnnnnnnnnnnnnnnnnnnnnnnnnnnnnnnnnnnnnnnnnnnnnnnnnnnnnnnnnnnnnnnnnnnnnnnnnnnnnnnnnnnnnnnnnnnnnnnnnnnnnnnnnnnnnnnnnnnnnnnnnnnnnnnnnnnnnnnnnnnnnnnnnnnnnnnnnnnnnnnnnnnnnnnnnnnnnnnnnnnnnnnnnnnnnnnnnnnnnnnnnnnnnnnnnnnnnnnnnnnnnnnnnnnnnnnnnnnnnnnnnnnnnnnnnnnnnnnnnnnnnnnnnnnnnnnnnnnnnnnnnnnnnnnnnnnnnnnnnnnnnnnnnnnnnnnnnnnnnnnnnnnnnnnnnnnnnnnnnnnnnnnnnnnnnnnnnnnnnnnnnnnnnnnnnnnnnnnnnnnnnnnnnnnnnnnnnnnnnnnnnnnnnnnnnnnnnnnnnnnnnnnnnnnnnnnnnnnnnnnnnnnnnnnnnnnnnnnnnnnnnnnnnnnnnnnnnnnnnnnnnnnnnnnnnnnnnnnnnnnnnnnnnnnnnnnnnnnnnnnnnnnnnnnnnnnnnnnnnnnnnnnnnnnnnnnnnnnnnnnnnnnnnnnnnnnnnnnnnnnnnnnnnnnnnnnnnnnnnnnnnnnnnnnnnnnnnnnnnnnnnnnnnnnnnnnnnnnnnnnnnnnnnnnnnnnnnnnnnnnnnnnnnnnnnnnnnnnnnnnnnnnnnnnnnnnnnnnnnnnnnnnnnnnnnnnnnnnnnnnnnnnnnnnnnnnnnnnnnnnnnnnnnnnnnnnnnnnnnnnnnnnnnnnnnnnnnnnnnnnnnnnnnnnnnnnnnnnnnnnnnnnnnnnnnnnnnnnnnnnnnnnnnnnnnnnnnnnnnnnnnnnnnnnnnnnnnnnnnnnnnnnnnnnnnnnnnnnnnnnnnnnnnnnnnnnnnnnnnnnnnnnnnnnnnnnnnnnnnnnnnnnnnnnnnnnnnnnnnnnnnnnnnnnnnnnnnnnnnnnnnnnnnnnnnnnnnnnnnnnnnnnnnnnnnnnnnnnnnnnnnnnnnnnnnnnnnnnnnnnnnnnnnnnnnnnnnnnnnnnnnnnnnnnnnnnnnnnnnnnnnnnnnnnnnnnnnnnnnnnnnnnnnnnnnnnnnnnnnnnnnnnnnnnnnnnnnnnnnnnnnnnnnnnnnnnnnnnnnnnnnnnnnnnnnnnnnnnnnnnnnnnnnnnnnnnnnnnnnnnnnnnnnnnnnnnnnnnnnnnnnnnnnnnnnnnnnnnnnnnnnnnnnnnnnnnnnnnnnnnnnnnnnnnnnnnnnnnnnnnnnnnnnnnnnnnnnnnnnnnnnnnnnnnnnnnnnnnnnnnnnnnnnnnnnnnnnnnnnnnnnnnnnnnnnnnnnnnnnnnnnnnnnnnnnnnnnnnnnnnnnnnnnnnnnnnnnnnnnnnnnnnnnnnnnnnnnnnnnnnnnnnnnnnnnnnnnnnnnnnnnnnnnnnnnnnnnnnnnnnnnnnnnnnnnnnnnnnnnnnnnnnnnnnnnnnnnnnnnnnnnnnnnnnnnnnnnnnnnnnnnnnnnnnnnnnnnnnnnnnnnnnnnnnnnnnnnnnnnnnnnnnnnnnnnnnnnnnnnnnnnnnnnnnnnnnnnnnnnnnnnnnnnnnnnnnnnnnnnnnnnnnnnnnnnnnnnnnnnnnnnnnnnnnnnnnnnnnnnnnnnnnnnnnnnnnnnnnnnnnnnnnnnnnnnnnnnnnnnnnnnnnnnnnnnnnnnnnnnnnnnnnnnnnnnnnnnnnnnnnnnnnnnnnnnnnnnnnnnnnnnnnnnnnnnnnnnnnnnnnnnnnnnnnnnnnnnnnnnnnnnnnnnnnnnnnnnnnnnnnnnnnnnnnnnnnnnnnnnnnnnnnnnnnnnnnnnnnnnnnnnnnnnnnnnnnnnnnnnnnnnnnnnnnnnnnnnnnnnnnnnnnnnnnnnnnnnnnnnnnnnnnnnnnnnnnnnnnnnnnnnnnnnnnnnnnnnnnnnnnnnnnnnnnnnnnnnnnnnnnnnnnnnnnnnnnnnnnnnnnnnnnnnnnnnnnnnnnnnnnnnnnnnnnnnnnnnnnnnnnnnnnnnnnnnnnnnnnnnnnnnnnnnnnnnnnnnnnnnnnnnnnnnnnnnnnnnnnnnnnnnnnnnnnnnnnnnnnnnnnnnnnnnnnnnnnnnnnnnnnnnnnnnnnnnnnnnnnnnnnnnnnnnnnnnnnnnnnnnnnnnnnnnnnnnnnnnnnnnnnnnnnnnnnnnnnnnnnnnnnnnnnnnnnnnnnnnnnnnnnnnnnnnnnnnnnnnnnnnnnnnnnnnnnnnnnnnnnnnnnnnnnnnnnnnnnnnnnnnnnnnnnnnnnnnnnnnnnnnnnnnnnnnnnnnnnnnnnnnnnnnnnnnnnnnnnnnnnnnnnnnnnnnnnnnnnnnnnnnnnnnnnnnnnnnnnnnnnnnnnnnnnnnnnnnnnnnnnnnnnnnnnnnnnnnnnnnnnnnnnnnnnnnnnnnnnnnnnnnnnnnnnnnnnnnnnnnnnnnnnnnnnnnnnnnnnnnnnnnnnnnnnnnnnnnnnnnnnnnnnnnnnnnnnnnnnnnnnnnnnnnnnnnnnnnnnnnnnnnnnnnnnnnnnnnnnnnnnnnnnnnnnnnnnnnnnnnnnnnnnnnnnnnnnnnnnnnnnnnnnnnnnnnnnnnnnnnnnnnnnnnnnnnnnnnnnnnnnnnnnnnnnnnnnnnnnnnnnnnnnnnnnnnnnnnnnnnnnnnnnnnnnnnnnnnnnnnnnnnnnnnnnnnnnnnnnnnnnnnnnnnnnnnnnnnnnnnnnnnnnnnnnnnnnnnnnnnnnnnnnnnnnnnnnnnnnnnnnnnnnnnnnnnnnnnnnnnnnnnnnnnnnnnnnnnnnnnnnnnnnnnnnnnnnnnnnnnnnnnnnnnnnnnnnnnnnnnnnnnnnnnnnnnnnnnnnnnnnnnnnnnnnnnnnnnnnnnnnnnnnnnnnnnnnnnnnnnnnnnnnnnnnnnnnnnnnnnnnnnnnnnnnnnnnnnnnnnnnnnnnnnnnnnnnnnnnnnnnnnnnnnnnnnnnnnnnnnnnnnnnnnnnnnnnnnnnnnnnnnnnnnnnnnnnnnnnnnnnnnnnnnnnnnnnnnnnnnnnnnnnnnnnnnnnnnnnnnnnnnnnnnnnnnnnnnnnnnnnnnnnnnnnnnnnnnnnnnnnnnnnnnnnnnnnnnnnnnnnnnnnnnnnnnnnnnnnnnnnnnnnnnnnnnnnnnnnnnnnnnnnnnnnnnnnnnnnnnnnnnnnnnnnnnnnnnnnnnnnnnnnnnnnnnnnnnnnnnnnnnnnnnnnnnnnnnnnnnnnnnnnnnnnnnnnnnnnnnnnnnnnnnnnnnnnnnnnnnnnnnnnnnnnnnnnnnnnnnnnnnnnnnnnnnnnnnnnnnnnnnnnnnnnnnnnnnnnnnnnnnnnnnnnnnnnnnnnnnnnnnnnnnnnnnnnnnnnnnnnnnnnnnnnnnnnnnnnnnnnnnnnnnnnnnnnnnnnnnnnnnnnnnnnnnnnnnnnnnnnnnnnnnnnnnnnnnnnnnnnnnnnnnnnnnnnnnnnnnnnnnnnnnnnnnnnnnnnnnnnnnnnnnnnnnnnnnnnnnnnnnnnnnnnnnnnnnnnnnnnnnnnnnnnnnnnnnnnnnnnnnnnnnnnnnnnnnnnnnnnnnnnnnnnnnnnnnnnnnnnnnnnnnnnnnnnnnnnnnnnnnnnnnnnnnnnnnnnnnnnnnnnnnnnnnnnnnnnnnnnnnnnnnnnnnnnnnnnnnnnnnnnnnnnnnnnnnnnnnnnnnnnnnnnnnnnnnnnnnnnnnnnnnnnnnnnnnnnnnnnnnnnnnnnnnnnnnnnnnnnnnnnnnnnnnnnnnnnnnnnnnnnnnnnnnnnnnnnnnnnnnnnnnnnnnnnnnnnnnnnnnnnnnnnnnnnnnnnnnnnnnnnnnnnnnnnnnnnnnnnnnnnnnnnnnnnnnnnnnnnnnnnnnnnnnnnnnnnnnnnnnnnnnnnnnnnnnnnnnnnnnnnnnnnnnnnnnnnnnnnnnnnnnnnnnnnnnnnnnnnnnnnnnnnnnnnnnnnnnnnnnnnnnnnnnnnnnnnnnnnnnnnnnnnnnnnnnnnnnnnnnnnnnnnnnnnnnnnnnnnnnnnnnnnnnnnnnnnnnnnnnnnnnnnnnnnnnnnnnnnnnnnnnnnnnnnnnnnnnnnnnnnnnnnnnnnnnnnnnnnnnnnnnnnnnnnnnnnnnnnnnnnnnnnnnnnnnnnnnnnnnnnnnnnnnnnnnnnnnnnnnnnnnnnnnnnnnnnnnnnnnnnnnnnnnnnnnnnnnnnnnnnnnnnnnnnnnnnnnnnnnnnnnnnnnnnnnnnnnnnnnnnnnnnnnnnnnnnnnnnnnnnnnnnnnnnnnnnnnnnnnnnnnnnnnnnnnnnnnnnnnnnnnnnnnnnnnnnnnnnnnnnnnnnnnnnnnnnnnnnnnnnnnnnnnnnnnnnnnnnnnnnnnnnnnnnnnnnnnnnnnnnnnnnnnnnnnnnnnnnnnnnnnnnnnnnnnnnnnnnnnnnnnnnnnnnnnnnnnnnnnnnnnnnnnnnnnnnnnnnnnnnnnnnnnnnnnnnnnnnnnnnnnnnnnnnnnnnnnnnnnnnnnnnnnnnnnnnnnnnnnnnnnnnnnnnnnnnnnnnnnnnnnnnnnnnnnnnnnnnnnnnnnnnnnnnnnnnnnnnnnnnnnnnnnnnnnnnnnnnnnnnnnnnnnnnnnnnnnnnnnnnnnnnnnnnnnnnnnnnnnnnnnnnnnnnnnnnnnnnnnnnnnnnnnnnnnnnnnnnnnnnnnnnnnnnnnnnnnnnnnnnnnnnnnnnnnnnnnnnnnnnnnnnnnnnnnnnnnnnnnnnnnnnnnnnnnnnnnnnnnnnnnnnnnnnnnnnnnnnnnnnnnnnnnnnnnnnnnnnnnnnnnnnnnnnnnnnnnnnnnnnnnnnnnnnnnnnnnnnnnnnnnnnnnnnnnnnnnnnnnnnnnnnnnnnnnnnnnnnnnnnnnnnnnnnnnnnnnnnnnnnnnnnnnnnnnnnnnnnnnnnnnnnnnnnnnnnnnnnnnnnnnnnnnnnnnnnnnnnnnnnnnnnnnnnnnnnnnnnnnnnnnnnnnnnnnnnnnnnnnnnnnnnnnnnnnnnnnnnnnnnnnnnnnnnnnnnnnnnnnnnnnnnnnnnnnnnnnnnnnnnnnnnnnnnnnnnnnnnnnnnnnnnnnnnnnnnnnnnnnnnnnnnnnnnnnnnnnnnnnnnnnnnnnnnnnnnnnnnnnnnnnnnnnnnnnnnnnnnnnnnnnnnnnnnnnnnnnnnnnnnnnnnnnnnnnnnnnnnnnnnnnnnnnnnnnnnnnnnnnnnnnnnnnnnnnnnnnnnnnnnnnnnnnnnnnnnnnnnnnnnnnnnnnnnnnnnnnnnnnnnnnnnnnnnnnnnnnnnnnnnnnnnnnnnnnnnnnnnnnnnnnnnnnnnnnnnnnnnnnnnnnnnnnnnnnnnnnnnnnnnnnnnnnnnnnnnnnnnnnnnnnnnnnnnnnnnnnnnnnnnnnnnnnnnnnnnnnnnnnnnnnnnnnnnnnnnnnnnnnnnnnnnnnnnnnnnnnnnnnnnnnnnnnnnnnnnnnnnnnnnnnnnnnnnnnnnnnnnnnnnnnnnnnnnnnnnnnnnnnnnnnnnnnnnnnnnnnnnnnnnnnnnnnnnnnnnnnnnnnnnnnnnnnnnnnnnnnnnnnnnnnnnnnnnnnnnnnnnnnnnnnnnnnnnnnnnnnnnnnnnnnnnnnnnnnnnnnnnnnnnnnnnnnnnnnnnnnnnnnnnnnnnnnnnnnnnnnnnnnnnnnnnnnnnnnnnnnnnnnnnnnnnnnnnnnnnnnnnnnnnnnnnnnnnnnnnnnnnnnnnnnnnnnnnnnnnnnnnnnnnnnnnnnnnnnnnnnnnnnnnnnnnnnnnnnnnnnnnnnnnnnnnnnnnnnnnnnnnnnnnnnnnnnnnnnnnnnnnnnnnnnnnnnnnnnnnnnnnnnnnnnnnnnnnnnnnnnnnnnnnnnnnnnnnnnnnnnnnnnnnnnnnnnnnnnnnnnnnnnnnnnnnnnnnnnnnnnnnnnnnnnnnnnnnnnnnnnnnnnnnnnnnnnnnnnnnnnnnnnnnnnnnnnnnnnnnnnnnnnnnnnnnnnnnnnnnnnnnnnnnnnnnnnnnnnnnnnnnnnnnnnnnnnnnnnnnnnnnnnnnnnnnnnnnnnnnnnnnnnnnnnnnnnnnnnnnnnnnnnnnnnnnnnnnnnnnnnnnnnnnnnnnnnnnnnnnnnnnnnnnnnnnnnnnnnnnnnnnnnnnnnnnnnnnnnnnnnnnnnnnnnnnnnnnnnnnnnnnnnnnnnnnnnnnnnnnnnnnnnnnnnnnnnnnnnnnnnnnnnnnnnnnnnnnnnnnnnnnnnnnnnnnnnnnnnnnnnnnnnnnnnnnnnnnnnnnnnnnnnnnnnnnnnnnnnnnnnnnnnnnnnnnnnnnnnnnnnnnnnnnnnnnnnnnnnnnnnnnnnnnnnnnnnnnnnnnnnnnnnnnnnnnnnnnnnnnnnnnnnnnnnnnnnnnnnnnnnnnnnnnnnnnnnnnnnnnnnnnnnnnnnnnnnnnnnnnnnnnnnnnnnnnnnnnnnnnnnnnnnnnnnnnnnnnnnnnnnnnnnnnnnnnnnnnnnnnnnnnnnnnnnnnnnnnnnnnnnnnnnnnnnnnnnnnnnnnnnnnnnnnnnnnnnnnnnnnnnnnnnnnnnnnnnnnnnnnnnnnnnnnnnnnnnnnnnnnnnnnnnnnnnnnnnnnnnnnnnnnnnnnnnnnnnnnnnnnnnnnnnnnnnnnnnnnnnnnnnnnnnnnnnnnnnnnnnnnnnnnnnnnnnnnnnnnnnnnnnnnnnnnnnnnnnnnnnnnnnnnnnnnnnnnnnnnnnnnnnnnnnnnnnnnnnnnnnnnnnnnnnnnnnnnnnnnnnnnnnnnnnnnnnnnnnnnnnnnnnnnnnnnnnnnnnnnnnnnnnnnnnnnnnnnnnnnnnnnnnnnnnnnnnnnnnnnnnnnnnnnnnnnnnnnnnnnnnnnnnnnnnnnnnnnnnnnnnnnnnnnnnnnnnnnnnnnnnnnnnnnnnnnnnnnnnnnnnnnnnnnnnnnnnnnnnnnnnnnnnnnnnnnnnnnnnnnnnnnnnnnnnnnnnnnnnnnnnnnnnnnnnnnnnnnnnnnnnnnnnnnnnnnnnnnnnnnnnnnnnnnnnnnnnnnnnnnnnnnnnnnnnnnnnnnnnnnnnnnnnnnnnnnnnnnnnnnnnnnnnnnnnnnnnnnnnnnnnnnnnnnnnnnnnnnnnnnnnnnnnnnnnnnnnnnnnnnnnnnnnnnnnnnnnnnnnnnnnnnnnnnnnnnnnnnnnnnnnnnnnnnnnnnnnnnnnnnnnnnnnnnnnnnnnnnnnnnnnnnnnnnnnnnnnnnnnnnnnnnnnnnnnnnnnnnnnnnnnnnnnnnnnnnnnnnnnnnnnnnnnnnnnnnnnnnnnnnnnnnnnnnnnnnnnnnnnnnnnnnnnnnnnnnnnnnnnnnnnnnnnnnnnnnnnnnnnnnnnnnnnnnnnnnnnnnnnnnnnnnnnnnnnnnnnnnnnnnnnnnnnnnnnnnnnnnnnnnnnnnnnnnnnnnnnnnnnnnnnnnnnnnnnnnnnnnnnnnnnnnnnnnnnnnnnnnnnnnnnnnnnnnnnnnnnnnnnnnnnnnnnnnnnnnnnnnnnnnnnnnnnnnnnnnnnnnnnnnnnnnnnnnnnnnnnnnnnnnnnnnnnnnnnnnnnnnnnnnnnnnnnnnnnnnnnnnnnnnnnnnnnnnnnnnnnnnnnnnnnnnnnnnnnnnnnnnnnnnnnnnnnnnnnnnnnnnnnnnnnnnnnnnnnnnnnnnnnnnnnnnnnnnnnnnnnnnnnnnnnnnnnnnnnnnnnnnnnnnnnnnnnnnnnnnnnnnnnnnnnnnnnnnnnnnnnnnnnnnnnnnnnnnnnnnnnnnnnnnnnnnnnnnnnnnnnnnnnnnnnnnnnnnnnnnnnnnnnnnnnnnnnnnnnnnnnnnnnnnnnnnnnnnnnnnnnnnnnnnnnnnnnnnnnnnnnnnnnnnnnnnnnnnnnnnnnnnnnnnnnnnnnnnnnnnnnnnnnnnnnnnnnnnnnnnnnnnnnnnnnnnnnnnnnnnnnnnnnnnnnnnnnnnnnnnnnnnnnnnnnnnnnnnnnnnnnnnnnnnnnnnnnnnnnnnnnnnnnnnnnnnnnnnnnnnnnnnnnnnnnnnnnnnnnnnnnnnnnnnnnnnnnnnnnnnnnnnnnnnnnnnnnnnnnnnnnnnnnnnnnnnnnnnnnnnnnnnnnnnnnnnnnnnnnnnnnnnnnnnnnnnnnnnnnnnnnnnnnnnnnnnnnnnnnnnnnnnnnnnnnnnnnnnnnnnnnnnnnnnnnnnnnnnnnnnnnnnnnnnnnnnnnnnnnnnnnnnnnnnnnnnnnnnnnnnnnnnnnnnnnnnnnnnnnnnnnnnnnnnnnnnnnnnnnnnnnnnnnnnnnnnnnnnnnnnnnnnnnnnnnnnnnnnnnnnnnnnnnnnnnnnnnnnnnnnnnnnnnnnnnnnnnnnnnnnnnnnnnnnnnnnnnnnnnnnnnnnnnnnnnnnnnnnnnnnnnnnnnnnnnnnnnnnnnnnnnnnnnnnnnnnnnnnnnnnnnnnnnnnnnnnnnnnnnnnnnnnnnnnnnnnnnnnnnnnnnnnnnnnnnnnnnnnnnnnnnnnnnnnnnnnnnnnnnnnnnnnnnnnnnnnnnnnnnnnnnnnnnnnnnnnnnnnnnnnnnnnnnnnnnnnnnnnnnnnnnnnnnnnnnnnnnnnnnnnnnnnnnnnnnnnnnnnnnnnnnnnnnnnnnnnnnnnnnnnnnnnnnnnnnnnnnnnnnnnnnnnnnnnnnnnnnnnnnnnnnnnnnnnnnnnnnnnnnnnnnnnnnnnnnnnnnnnnnnnnnnnnnnnnnnnnnnnnnnnnnnnnnnnnnnnnnnnnnnnnnnnnnnnnnnnnnnnnnnnnnnnnnnnnnnnnnnnnnnnnnnnnnnnnnnnnnnnnnnnnnnnnnnnnnnnnnnnnnnnnnnnnnnnnnnnnnnnnnnnnnnnnnnnnnnnnnnnnnnnnnnnnnnnnnnnnnnnnnnnnnnnnnnnnnnnnnnnnnnnnnnnnnnnnnnnnnnnnnnnnnnnnnnnnnnnnnnnnnnnnnnnnnnnnnnnnnnnnnnnnnnnnnnnnnnnnnnnnnnnnnnnnnnnnnnnnnnnnnnnnnnnnnnnnnnnnnnnnnnnnnnnnnnnnnnnnnnnnnnnnnnnnnnnnnnnnnnnnnnnnnnnnnnnnnnnnnnnnnnnnnnnnnnnnnnnnnnnnnnnnnnnnnnnnnnnnnnnnnnnnnnnnnnnnnnnnnnnnnnnnnnnnnnnnnnnnnnnnnnnnnnnnnnnnnnnnnnnnnnnnnnnnnnnnnnnnnnnnnnnnnnnnnnnnnnnnnnnnnnnnnnnnnnnnnnnnnnnnnnnnnnnnnnnnnnnnnnnnnnnnnnnnnnnnnnnnnnnnnnnnnnnnnnnnnnnnnnnnnnnnnnnnnnnnnnnnnnnnnnnnnnnnnnnnnnnnnnnnnnnnnnnnnnnnnnnnnnnnnnnnnnnnnnnnnnnnnnnnnnnnnnnnnnnnnnnnnnnnnnnnnnnnnnnnnnnnnnnnnnnnnnnnnnnnnnnnnnnnnnnnnnnnnnnnnnnnnnnnnnnnnnnnnnnnnnnnnnnnnnnnnnnnnnnnnnnnnnnnnnnnnnnnnnnnnnnnnnnnnnnnnnnnnnnnnnnnnnnnnnnnnnnnnnnnnnnnnnnnnnnnnnnnnnnnnnnnnnnnnnnnnnnnnnnnnnnnnnnnnnnnnnnnnnnnnnnnnnnnnnnnnnnnnnnnnnnnnnnnnnnnnnnnnnnnnnnnnnnnnnnnnnnnnnnnnnnnnnnnnnnnnnnnnnnnnnnnnnnnnnnnnnnnnnnnnnnnnnnnnnnnnnnnnnnnnnnnnnnnnnnnnnnnnnnnnnnnnnnnnnnnnnnnnnnnnnnnnnnnnnnnnnnnnnnnnnnnnnnnnnnnnnnnnnnnnnnnnnnnnnnnnnnnnnnnnnnnnnnnnnnnnnnnnnnnnnnnnnnnnnnnnnnnnnnnnnnnnnnnnnnnnnnnnnnnnnnnnnnnnnnnnnnnnnnnnnnnnnnnnnnnnnnnnnnnnnnnnnnnnnnnnnnnnnnnnnnnnnnnnnnnnnnnnnnnnnnnnnnnnnnnnnnnnnnnnnnnnnnnnnnnnnnnnnnnnnnnnnnnnnnnnnnnnnnnnnnnnnnnnnnnnnnnnnnnnnnnnnnnnnnnnnnnnnnnnnnnnnnnnnnnnnnnnnnnnnnnnnnnnnnnnnnnnnnnnnnnnnnnnnnnnnnnnnnnnnnnnnnnnnnnnnnnnnnnnnnnnnnnnnnnnnnnnnnnnnnnnnnnnnnnnnnnnnnnnnnnnnnnnnnnnnnnnnnnnnnnnnnnnnnnnnnnnnnnnnnnnnnnnnnnnnnnnnnnnnnnnnnnnnnnnnnnnnnnnnnnnnnnnnnnnnnnnnnnnnnnnnnnnnnnnnnnnnnnnnnnnnnnnnnnnnnnnnnnnnnnnnnnnnnnnnnnnnnnnnnnnnnnnnnnnnnnnnnnnnnnnnnnnnnnnnnnnnnnnnnnnnnnnnnnnnnnnnnnnnnnnnnnnnnnnnnnnnnnnnnnnnnnnnnnnnnnnnnnnnnnnnnnnnnnnnnnnnnnnnnnnnnnnnnnnnnnnnnnnnnnnnnnnnnnnnnnnnnnnnnnnnnnnnnnnnnnnnnnnnnnnnnnnnnnnnnnnnnnnnnnnnnnnnnnnnnnnnnnnnnnnnnnnnnnnnnnnnnnnnnnnnnnnnnnnnnnnnnnnnnnnnnnnnnnnnnnnnnnnnnnnnnnnnnnnnnnnnnnnnnnnnnnnnnnnnnnnnnnnnnnnnnnnnnnnnnnnnnnnnnnnnnnnnnnnnnnnnnnnnnnnnnnnnnnnnnnnnnnnnnnnnnnnnnnnnnnnnnnnnnnnnnnnnnnnnnnnnnnnnnnnnnnnnnnnnnnnnnnnnnnnnnnnnnnnnnnnnnnnnnnnnnnnnnnnnnnnnnnnnnnnnnnnnnnnnnnnnnnnnnnnnnnnnnnnnnnnnnnnnnnnnnnnnnnnnnnnnnnnnnnnnnnnnnnnnnnnnnnnnnnnnnnnnnnnnnnnnnnnnnnnnnnnnnnnnnnnnnnnnnnnnnnnnnnnnnnnnnnnnnnnnnnnnnnnnnnnnnnnnnnnnnnnnnnnnnnnnnnnnnnnnnnnnnnnnnnnnnnnnnnnnnnnnnnnnnnnnnnnnnnnnnnnnnnnnnnnnnnnnnnnnnnnnnnnnnnnnnnnnnnnnnnnnnnnnnnnnnnnnnnnnnnnnnnnnnnnnnnnnnnnnnnnnnnnnnnnnnnnnnnnnnnnnnnnnnnnnnnnnnnnnnnnnnnnnnnnnnnnnnnnnnnnnnnnnnnnnnnnnnnnnnnnnnnnnnnnnnnnnnnnnnnnnnnnnnnnnnnnnnnnnnnnnnnnnnnnnnnnnnnnnnnnnnnnnnnnnnnnnnnnnnnnnnnnnnnnnnnnnnnnnnnnnnnnnnnnnnnnnnnnnnnnnnnnnnnnnnnnnnnnnnnnnnnnnnnnnnnnnnnnnnnnnnnnnnnnnnnnnnnnnnnnnnnnnnnnnnnnnnnnnnnnnnnnnnnnnnnnnnnnnnnnnnnnnnnnnnnnnnnnnnnnnnnnnnnnnnnnnnnnnnnnnnnnnnnnnnnnnnnnnnnnnnnnnnnnnnnnnnnnnnnnnnnnnnnnnnnnnnnnnnnnnnnnnnnnnnnnnnnnnnnnnnnnnnnnnnnnnnnnnnnnnnnnnnnnnnnnnnnnnnnnnnnnnnnnnnnnnnnnnnnnnnnnnnnnnnnnnnnnnnnnnnnnnnnnnnnnnnnnnnnnnnnnnnnnnnnnnnnnnnnnnnnnnnnnnnnnnnnnnnnnnnnnnnnnnnnnnnnnnnnnnnnnnnnnnnnnnnnnnnnnnnnnnnnnnnnnnnnnnnnnnnnnnnnnnnnnnnnnnnnnnnnnnnnnnnnnnnnnnnnnnnnnnnnnnnnnnnnnnnnnnnnnnnnnnnnnnnnnnnnnnnnnnnnnnnnnnnnnnnnnnnnnnnnnnnnnnnnnnnnnnnnnnnnnnnnnnnnnnnnnnnnnnnnnnnnnnnnnnnnnnnnnnnnnnnnnnnnnnnnnnnnnnnnnnnnnnnnnnnnnnnnnnnnnnnnnnnnnnnnnnnnnnnnnnnnnnnnnnnnnnnnnnnnnnnnnnnnnnnnnnnnnnnnnnnnnnnnnnnnnnnnnnnnnnnnnnnnnnnnnnnnnnnnnnnnnnnnnnnnnnnnnnnnnnnnnnnnnnnnnnnnnnnnnnnnnnnnnnnnnnnnnnnnnnnnnnnnnnnnnnnnnnnnnnnnnnnnnnnnnnnnnnnnnnnnnnnnnnnnnnnnnnnnnnnnnnnnnnnnnnnnnnnnnnnnnnnnnnnnnnnnnnnnnnnnnnnnnnnnnnnnnnnnnnnnnnnnnnnnnnnnnnnnnnnnnnnnnnnnnnnnnnnnnnnnnnnnnnnnnnnnnnnnnnnnnnnnnnnnnnnnnnnnnnnnnnnnnnnnnnnnnnnnnnnnnnnnnnnnnnnnnnnnnnnnnnnnnnnnnnnnnnnnnnnnnnnnnnnnnnnnnnnnnnnnnnnnnnnnnnnnnnnnnnnnnnnnnnnnnnnnnnnnnnnnnnnnnnnnnnnnnnnnnnnnnnnnnnnnnnnnnnnnnnnnnnnnnnnnnnnnnnnnnnnnnnnnnnnnnnnnnnnnnnnnnnnnnnnnnnnnnnnnnnnnnnnnnnnnnnnnnnnnnnnnnnnnnnnnnnnnnnnnnnnnnnnnnnnnnnnnnnnnnnnnnnnnnnnnnnnnnnnnnnnnnnnnnnnnnnnnnnnnnnnnnnnnnnnnnnnnnnnnnnnnnnnnnnnnnnnnnnnnnnnnnnnnnnnnnnnnnnnnnnnnnnnnnnnnnnnnnnnnnnnnnnnnnnnnnnnnnnnnnnnnnnnnnnnnnnnnnnnnnnnnnnnnnnnnnnnnnnnnnnnnnnnnnnnnnnnnnnnnnnnnnnnnnnnnnnnnnnnnnnnnnnnnnnnnnnnnnnnnnnnnnnnnnnnnnnnnnnnnnnnnnnnnnnnnnnnnnnnnnnnnnnnnnnnnnnnnnnnnnnnnnnnnnnnnnnnnnnnnnnnnnnnnnnnnnnnnnnnnnnnnnnnnnnnnnnnnnnnnnnnnnnnnnnnnnnnnnnnnnnnnnnnnnnnnnnnnnnnnnnnnnnnnnnnnnnnnnnnnnnnnnnnnnnnnnnnnnnnnnnnnnnnnnnnnnnnnnnnnnnnnnnnnnnnnnnnnnnnnnnnnnnnnnnnnnnnnnnnnnnnnnnnnnnnnnnnnnnnnnnnnnnnnnnnnnnnnnnnnnnnnnnnnnnnnnnnnnnnnnnnnnnnnnnnnnnnnnnnnnnnnnnnnnnnnnnnnnnnnnnnnnnnnnnnnnnnnnnnnnnnnnnnnnnnnnnnnnnnnnnnnnnnnnnnnnnnnnnnnnnnnnnnnnnnnnnnnnnnnnnnnnnnnnnnnnnnnnnnnnnnnnnnnnnnnnnnnnnnnnnnnnnnnnnnnnnnnnnnnnnnnnnnnnnnnnnnnnnnnnnnnnnnnnnnnnnnnnnnnnnnnnnnnnnnnnnnnnnnnnnnnnnnnnnnnnnnnnnnnnnnnnnnnnnnnnnnnnnnnnnnnnnnnnnnnnnnnnnnnnnnnnnnnnnnnnnnnnnnnnnnnnnnnnnnnnnnnnnnnnnnnnnnnnnnnnnnnnnnnnnnnnnnnnnnnnnnnnnnnnnnnnnnnnnnnnnnnnnnnnnnnnnnnnnnnnnnnnnnnnnnnnnnnnnnnnnnnnnnnnnnnnnnnnnnnnnnnnnnnnnnnnnnnnnnnnnnnnnnnnnnnnnnnnnnnnnnnnnnnnnnnnnnnnnnnnnnnnnnnnnnnnnnnnnnnnnnnnnnnnnnnnnnnnnnnnnnnnnnnnnnnnnnnnnnnnnnnnnnnnnnnnnnnnnnnnnnnnnnnnnnnnnnnnnnnnnnnnnnnnnnnnnnnnnnnnnnnnnnnnnnnnnnnnnnnnnnnnnnnnnnnnnnnnnnnnnnnnnnnnnnnnnnnnnnnnnnnnnnnnnnnnnnnnnnnnnnnnnnnnnnnnnnnnnnnnnnnnnnnnnnnnnnnnnnnnnnnnnnnnnnnnnnnnnnnnnnnnnnnnnnnnnnnnnnnnnnnnnnnnnnnnnnnnnnnnnnnnnnnnnnnnnnnnnnnnnnnnnnnnnnnnnnnnnnnnnnnnnnnnnnnnnnnnnnnnnnnnnnnnnnnnnnnnnnnnnnnnnnnnnnnnnnnnnnnnnnnnnnnnnnnnnnnnnnnnnnnnnnnnnnnnnnnnnnnnnnnnnnnnnnnnnnnnnnnnnnnnnnnnnnnnnnnnnnnnnnnnnnnnnnnnnnnnnnnnnnnnnnnnnnnnnnnnnnnnnnnnnnnnnnnnnnnnnnnnnnnnnnnnnnnnnnnnnnnnnnnnnnnnnnnnnnnnnnnnnnnnnnnnnnnnnnnnnnnnnnnnnnnnnnnnnnnnnnnnnnnnnnnnnnnnnnnnnnnnnnnnnnnnnnnnnnnnnnnnnnnnnnnnnnnnnnnnnnnnnnnnnnnnnnnnnnnnnnnnnnnnnnnnnnnnnnnnnnnnnnnnnnnnnnnnnnnnnnnnnnnnnnnnnnnnnnnnnnnnnnnnnnnnnnnnnnnnnnnnnnnnnnnnnnnnnnnnnnnnnnnnnnnnnnnnnnnnnnnnnnnnnnnnnnnnnnnnnnnnnnnnnnnnnnnnnnnnnnnnnnnnnnnnnnnnnnnnnnnnnnnnnnnnnnnnnnnnnnnnnnnnnnnnnnnnnnnnnnnnnnnnnnnnnnnnnnnnnnnnnnnnnnnnnnnnnnnnnnnnnnnnnnnnnnnnnnnnnnnnnnnnnnnnnnnnnnnnnnnnnnnnnnnnnnnnnnnnnnnnnnnnnnnnnnnnnnnnnnnnnnnnnnnnnnnnnnnnnnnnnnnnnnnnnnnnnnnnnnnnnnnnnnnnnnnnnnnnnnnnnnnnnnnnnnnnnnnnnnnnnnnnnnnnnnnnnnnnnnnnnnnnnnnnnnnnnnnnnnnnnnnnnnnnnnnnnnnnnnnnnnnnnnnnnnnnnnnnnnnnnnnnnnnnnnnnnnnnnnnnnnnnnnnnnnnnnnnnnnnnnnnnnnnnnnnnnnnnnnnnnnnnnnnnnnnnnnnnnnnnnnnnnnnnnnnnnnnnnnnnnnnnnnnnnnnnnnnnnnnnnnnnnnnnnnnnnnnnnnnnnnnnnnnnnnnnnnnnnnnnnnnnnnnnnnnnnnnnnnnnnnnnnnnnnnnnnnnnnnnnnnnnnnnnnnnnnnnnnnnnnnnnnnnnnnnnnnnnnnnnnnnnnnnnnnnnnnnnnnnnnnnnnnnnnnnnnnnnnnnnnnnnnnnnnnnnnnnnnnnnnnnnnnnnnnnnnnnnnnnnnnnnnnnnnnnnnnnnnnnnnnnnnnnnnnnnnnnnnnnnnnnnnnnnnnnnnnnnnnnnnnnnnnnnnnnnnnnnnnnnnnnnnnnnnnnnnnnnnnnnnnnnnnnnnnnnnnnnnnnnnnnnnnnnnnnnnnnnnnnnnnnnnnnnnnnnnnnnnnnnnnnnnnnnnnnnnnnnnnnnnnnnnnnnnnnnnnnnnnnnnnnnnnnnnnnnnnnnnnnnnnnnnnnnnnnnnnnnnnnnnnnnnnnnnnnnnnnnnnnnnnnnnnnnnnnnnnnnnnnnnnnnnnnnnnnnnnnnnnnnnnnnnnnnnnnnnnnnnnnnnnnnnnnnnnnnnnnnnnnnnnnnnnnnnnnnnnnnnnnnnnnnnnnnnnnnnnnnnnnnnnnnnnnnnnnnnnnnnnnnnnnnnnnnnnnnnnnnnnnnnnnnnnnnnnnnnnnnnnnnnnnnnnnnnnnnnnnnnnnnnnnnnnnnnnnnnnnnnnnnnnnnnnnnnnnnnnnnnnnnnnnnnnnnnnnnnnnnnnnnnnnnnnnnnnnnnnnnnnnnnnnnnnnnnnnnnnnnnnnnnnnnnnnnnnnnnnnnnnnnnnnnnnnnnnnnnnnnnnnnnnnnnnnnnnnnnnnnnnnnnnnnnnnnnnnnnnnnnnnnnnnnnnnnnnnnnnnnnnnnnnnnnnnnnnnnnnnnnnnnnnnnnnnnnnnnnnnnnnnnnnnnnnnnnnnnnnnnnnnnnnnnnnnnnnnnnnnnnnnnnnnnnnnnnnnnnnnnnnnnnnnnnnnnnnnnnnnnnnnnnnnnnnnnnnnnnnnnnnnnnnnnnnnnnnnnnnnnnnnnnnnnnnnnnnnnnnnnnnnnnnnnnnnnnnnnnnnnnnnnnnnnnnnnnnnnnnnnnnnnnnnnnnnnnnnnnnnnnnnnnnnnnnnnnnnnnnnnnnnnnnnnnnnnnnnnnnnnnnnnnnnnnnnnnnnnnnnnnnnnnnnnnnnnnnnnnnnnnnnnnnnnnnnnnnnnnnnnnnnnnnnnnnnnnnnnnnnnnnnnnnnnnnnnnnnnnnnnnnnnnnnnnnnnnnnnnnnnnnnnnnnnnnnnnnnnnnnnnnnnnnnnnnnnnnnnnnnnnnnnnnnnnnnnnnnnnnnnnnnnnnnnnnnnnnnnnnnnnnnnnnnnnnnnnnnnnnnnnnnnnnnnnnnnnnnnnnnnnnnnnnnnnnnnnnnnnnnnnnnnnnnnnnnnnnnnnnnnnnnnnnnnnnnnnnnnnnnnnnnnnnnnnnnnnnnnnnnnnnnnnnnnnnnnnnnnnnnnnnnnnnnnnnnnnnnnnnnnnnnnnnnnnnnnnnnnnnnnnnnnnnnnnnnnnnnnnnnnnnnnnnnnnnnnnnnnnnnnnnnnnnnnnnnnnnnnnnnnnnnnnnnnnnnnnnnnnnnnnnnnnnnnnnnnnnnnnnnnnnnnnnnnnnnnnnnnnnnnnnnnnnnnnnnnnnnnnnnnnnnnnnnnnnnnnnnnnnnnnnnnnnnnnnnnnnnnnnnnnnnnnnnnnnnnnnnnnnnnnnnnnnnnnnnnnnnnnnnnnnnnnnnnnnnnnnnnnnnnnnnnnnnnnnnnnnnnnnnnnnnnnnnnnnnnnnnnnnnnnnnnnnnnnnnnnnnnnnnnnnnnnnnnnnnnnnnnnnnnnnnnnnnnnnnnnnnnnnnnnnnnnnnnnnnnnnnnnnnnnnnnnnnnnnnnnnnnnnnnnnnnnnnnnnnnnnnnnnnnnnnnnnnnnnnnnnnnnnnnnnnnnnnnnnnnnnnnnnnnnnnnnnnnnnnnnnnnnnnnnnnnnnnnnnnnnnnnnnnnnnnnnnnnnnnnnnnnnnnnnnnnnnnnnnnnnnnnnnnnnnnnnnnnnnnnnnnnnnnnnnnnnnnnnnnnnnnnnnnnnnnnnnnnnnnnnnnnnnnnnnnnnnnnnnnnnnnnnnnnnnnnnnnnnnnnnnnnnnnnnnnnnnnnnnnnnnnnnnnnnnnnnnnnnnnnnnnnnnnnnnnnnnnnnnnnnnnnnnnnnnnnnnnnnnnnnnnnnnnnnnnnnnnnnnnnnnnnnnnnnnnnnnnnnnnnnnnnnnnnnnnnnnnnnnnnnnnnnnnnnnnnnnnnnnnnnnnnnnnnnnnnnnnnnnnnnnnnnnnnnnnnnnnnnnnnnnnnnnnnnnnnnnnnnnnnnnnnnnnnnnnnnnnnnnnnnnnnnnnnnnnnnnnnnnnnnnnnnnnnnnnnnnnnnnnnnnnnnnnnnnnnnnnnnnnnnnnnnnnnnnnnnnnnnnnnnnnnnnnnnnnnnnnnnnnnnnnnnnnnnnnnnnnnnnnnnnnnnnnnnnnnnnnnnnnnnnnnnnnnnnnnnnnnnnnnnnnnnnnnnnnnnnnnnnnnnnnnnnnnnnnnnnnnnnnnnnnnnnnnnnnnnnnnnnnnnnnnnnnnnnnnnnnnnnnnnnnnnnnnnnnnnnnnnnnnnnnnnnnnnnnnnnnnnnnnnnnnnnnnnnnnnnnnnnnnnnnnnnnnnnnnnnnnnnnnnnnnnnnnnnnnnnnnnnnnnnnnnnnnnnnnnnnnnnnnnnnnnnnnnnnnnnnnnnnnnnnnnnnnnnnnnnnnnnnnnnnnnnnnnnnnnnnnnnnnnnnnnnnnnnnnnnnnnnnnnnnnnnnnnnnnnnnnnnnnnnnnnnnnnnnnnnnnnnnnnnnnnnnnnnnnnnnnnnnnnnnnnnnnnnnnnnnnnnnnnnnnnnnnnnnnnnnnnnnnnnnnnnnnnnnnnnnnnnnnnnnnnnnnnnnnnnnnnnnnnnnnnnnnnnnnnnnnnnnnnnnnnnnnnnnnnnnnnnnnnnnnnnnnnnnnnnnnnnnnnnnnnnnnnnnnnnnnnnnnnnnnnnnnnnnnnnnnnnnnnnnnnnnnnnnnnnnnnnnnnnnnnnnnnnnnnnnnnnnnnnnnnnnnnnnnnnnnnnnnnnnnnnnnnnnnnnnnnnnnnnnnnnnnnnnnnnnnnnnnnnnnnnnnnnnnnnnnnnnnnnnnnnnnnnnnnnnnnnnnnnnnnnnnnnnnnnnnnnnnnnnnnnnnnnnnnnnnnnnnnnnnnnnnnnnnnnnnnnnnnnnnnnnnnnnnnnnnnnnnnnnnnnnnnnnnnnnnnnnnnnnnnnnnnnnnnnnnnnnnnnnnnnnnnnnnnnnnnnnnnnnnnnnnnnnnnnnnnnnnnnnnnnnnnnnnnnnnnnnnnnnnnnnnnnnnnnnnnnnnnnnnnnnnnnnnnnnnnnnnnnnnnnnnnnnnnnnnnnnnnnnnnnnnnnnnnnnnnnnnnnnnnnnnnnnnnnnnnnnnnnnnnnnnnnnnnnnnnnnnnnnnnnnnnnnnnnnnnnnnnnnnnnnnnnnnnnnnnnnnnnnnnnnnnnnnnnnnnnnnnnnnnnnnnnnnnnnnnnnnnnnnnnnnnnnnnnnnnnnnnnnnnnnnnnnnnnnnnnnnnnnnnnnnnnnnnnnnnnnnnnnnnnnnnnnnnnnnnnnnnnnnnnnnnnnnnnnnnnnnnnnnnnnnnnnnnnnnnnnnnnnnnnnnnnnnnnnnnnnnnnnnnnnnnnnnnnnnnnnnnnnnnnnnnnnnnnnnnnnnnnnnnnnnnnnnnnnnnnnnnnnnnnnnnnnnnnnnnnnnnnnnnnnnnnnnnnnnnnnnnnnnnnnnnnnnnnnnnnnnnnnnnnnnnnnnnnnnnnnnnnnnnnnnnnnnnnnnnnnnnnnnnnnnnnnnnnnnnnnnnnnnnnnnnnnnnnnnnnnnnnnnnnnnnnnnnnnnnnnnnnnnnnnnnnnnnnnnnnnnnnnnnnnnnnnnnnnnnnnnnnnnnnnnnnnnnnnnnnnnnnnnnnnnnnnnnnnnnnnnnnnnnnnnnnnnnnnnnnnnnnnnnnnnnnnnnnnnnnnnnnnnnnnnnnnnnnnnnnnnnnnnnnnnnnnnnnnnnnnnnnnnnnnnnnnnnnnnnnnnnnnnnnnnnnnnnnnnnnnnnnnnnnnnnnnnnnnnnnnnnnnnnnnnnnnnnnnnnnnnnnnnnnnnnnnnnnnnnnnnnnnnnnnnnnnnnnnnnnnnnnnnnnnnnnnnnnnnnnnnnnnnnnnnnnnnnnnnnnnnnnnnnnnnnnnnnnnnnnnnnnnnnnnnnnnnnnnnnnnnnnnnnnnnnnnnnnnnnnnnnnnnnnnnnnnnnnnnnnnnnnnnnnnnnnnnnnnnnnnnnnnnnnnnnnnnnnnnnnnnnnnnnnnnnnnnnnnnnnnnnnnnnnnnnnnnnnnnnnnnnnnnnnnnnnnnnnnnnnnnnnnnnnnnnnnnnnnnnnnnnnnnnnnnnnnnnnnnnnnnnnnnnnnnnnnnnnnnnnnnnnnnnnnnnnnnnnnnnnnnnnnnnnnnnnnnnnnnnnnnnnnnnnnnnnnnnnnnnnnnnnnnnnnnnnnnnnnnnnnnnnnnnnnnnnnnnnnnnnnnnnnnnnnnnnnnnnnnnnnnnnnnnnnnnnnnnnnnnnnnnnnnnnnnnnnnnnnnnnnnnnnnnnnnnnnnnnnnnnnnnnnnnnnnnnnnnnnnnnnnnnnnnnnnnnnnnnnnnnnnnnnnnnnnnnnnnnnnnnnnnnnnnnnnnnnnnnnnnnnnnnnnnnnnnnnnnnnnnnnnnnnnnnnnnnnnnnnnnnnnnnnnnnnnnnnnnnnnnnnnnnnnnnnnnnnnnnnnnnnnnnnnnnnnnnnnnnnnnnnnnnnnnnnnnnnnnnnnnnnnnnnnnnnnnnnnnnnnnnnnnnnnnnnnnnnnnnnnnnnnnnnnnnnnnnnnnnnnnnnnnnnnnnnnnnnnnnnnnnnnnnnnnnnnnnnnnnnnnnnnnnnnnnnnnnnnnnnnnnnnnnnnnnnnnnnnnnnnnnnnnnnnnnnnnnnnnnnnnnnnnnnnnnnnnnnnnnnnnnnnnnnnnnnnnnnnnnnnnnnnnnnnnnnnnnnnnnnnnnnnnnnnnnnnnnnnnnnnnnnnnnnnnnnnnnnnnnnnnnnnnnnnnnnnnnnnnnnnnnnnnnnnnnnnnnnnnnnnnnnnnnnnnnnnnnnnnnnnnnnnnnnnnnnnnnnnnnnnnnnnnnnnnnnnnnnnnnnnnnnnnnnnnnnnnnnnnnnnnnnnnnnnnnnnnnnnnnnnnnnnnnnnnnnnnnnnnnnnnnnnnnnnnnnnnnnnnnnnnnnnnnnnnnnnnnnnnnnnnnnnnnnnnnnnnnnnnnnnnnnnnnnnnnnnnnnnnnnnnnnnnnnnnnnnnnnnnnnnnnnnnnnnnnnnnnnnnnnnnnnnnnnnnnnnnnnnnnnnnnnnnnnnnnnnnnnnnnnnnnnnnnnnnnnnnnnnnnnnnnnnnnnnnnnnnnnnnnnnnnnnnnnnnnnnnnnnnnnnnnnnnnnnnnnnnnnnnnnnnnnnnnnnnnnnnnnnnnnnnnnnnnnnnnnnnnnnnnnnnnnnnnnnnnnnnnnnnnnnnnnnnnnnnnnnnnnnnnnnnnnnnnnnnnnnnnnnnnnnnnnnnnnnnnnnnnnnnnnnnnnnnnnnnnnnnnnnnnnnnnnnnnnnnnnnnnnnnnnnnnnnnnnnnnnnnnnnnnnnnnnnnnnnnnnnnnnnnnnnnnnnnnnnnnnnnnnnnnnnnnnnnnnnnnnnnnnnnnnnnnnnnnnnnnnnnnnnnnnnnnnnnnnnnnnnnnnnnnnnnnnnnnnnnnnnnnnnnnnnnnnnnnnnnnnnnnnnnnnnnnnnnnnnnnnnnnnnnnnnnnnnnnnnnnnnnnnnnnnnnnnnnnnnnnnnnnnnnnnnnnnnnnnnnnnnnnnnnnnnnnnnnnnnnnnnnnnnnnnnnnnnnnnnnnnnnnnnnnnnnnnnnnnnnnnnnnnnnnnnnnnnnnnnnnnnnnnnnnnnnnnnnnnnnnnnnnnnnnnnnnnnnnnnnnnnnnnnnnnnnnnnnnnnnnnnnnnnnnnnnnnnnnnnnnnnnnnnnnnnnnnnnnnnnnnnnnnnnnnnnnnnnnnnnnnnnnnnnnnnnnnnnnnnnnnnnnnnnnnnnnnnnnnnnnnnnnnnnnnnnnnnnnnnnnnnnnnnnnnnnnnnnnnnnnnnnnnnnnnnnnnnnnnnnnnnnnnnnnnnnnnnnnnnnnnnnnnnnnnnnnnnnnnnnnnnnnnnnnnnnnnnnnnnnnnnnnnnnnnnnnnnnnnnnnnnnnnnnnnnnnnnnnnnnnnnnnnnnnnnnnnnnnnnnnnnnnnnnnnnnnnnnnnnnnnnnnnnnnnnnnnnnnnnnnnnnnnnnnnnnnnnnnnnnnnnnnnnnnnnnnnnnnnnnnnnnnnnnnnnnnnnnnnnnnnnnnnnnnnnnnnnnnnnnnnnnnnnnnnnnnnnnnnnnnnnnnnnnnnnnnnnnnnnnnnnnnnnnnnnnnnnnnnnnnnnnnnnnnnnnnnnnnnnnnnnnnnnnnnnnnnnnnnnnnnnnnnnnnnnnnnnnnnnnnnnnnnnnnnnnnnnnnnnnnnnnnnnnnnnnnnnnnnnnnnnnnnnnnnnnnnnnnnnnnnnnnnnnnnnnnnnnnnnnnnnnnnnnnnnnnnnnnnnnnnnnnnnnnnnnnnnnnnnnnnnnnnnnnnnnnnnnnnnnnnnnnnnnnnnnnnnnnnnnnnnnnnnnnnnnnnnnnnnnnnnnnnnnnnnnnnnnnnnnnnnnnnnnnnnnnnnnnnnnnnnnnnnnnnnnnnnnnnnnnnnnnnnnnnnnnnnnnnnnnnnnnnnnnnnnnnnnnnnnnnnnnnnnnnnnnnnnnnnnnnnnnnnnnnnnnnnnnnnnnnnnnnnnnnnnnnnnnnnnnnnnnnnnnnnnnnnnnnnnnnnnnnnnnnnnnnnnnnnnnnnnnnnnnnnnnnnnnnnnnnnnnnnnnnnnnnnnnnnnnnnnnnnnnnnnnnnnnnnnnnnnnnnnnnnnnnnnnnnnnnnnnnnnnnnnnnnnnnnnnnnnnnnnnnnnnnnnnnnnnnnnnnnnnnnnnnnnnnnnnnnnnnnnnnnnnnnnnnnnnnnnnnnnnnnnnnnnnnnnnnnnnnnnnnnnnnnnnnnnnnnnnnnnnnnnnnnnnnnnnnnnnnnnnnnnnnnnnnnnnnnnnnnnnnnnnnnnnnnnnnnnnnnnnnnnnnnnnnnnnnnnnnnnnnnnnnnnnnnnnnnnnnnnnnnnnnnnnnnnnnnnnnnnnnnnnnnnnnnnnnnnnnnnnnnnnnnnnnnnnnnnnnnnnnnnnnnnnnnnnnnnnnnnnnnnnnnnnnnnnnnnnnnnnnnnnnnnnnnnnnnnnnnnnnnnnnnnnnnnnnnnnnnnnnnnnnnnnnnnnnnnnnnnnnnnnnnnnnnnnnnnnnnnnnnnnnnnnnnnnnnnnnnnnnnnnnnnnnnnnnnnnnnnnnnnnnnnnnnnnnnnnnnnnnnnnnnnnnnnnnnnnnnnnnnnnnnnnnnnnnnnnnnnnnnnnnnnnnnnnnnnnnnnnnnnnnnnnnnnnnnnnnnnnnnnnnnnnnnnnnnnnnnnnnnnnnnnnnnnnnnnnnnnnnnnnnnnnnnnnnnnnnnnnnnnnnnnnnnnnnnnnnnnnnnnnnnnnnnnnnnnnnnnnnnnnnnnnnnnnnnnnnnnnnnnnnnnnnnnnnnnnnnnnnnnnnnnnnnnnnnnnnnnnnnnnnnnnnnnnnnnnnnnnnnnnnnnnnnnnnnnnnnnnnnnnnnnnnnnnnnnnnnnnnnnnnnnnnnnnnnnnnnnnnnnnnnnnnnnnnnnnnnnnnnnnnnnnnnnnnnnnnnnnnnnnnnnnnnnnnnnnnnnnnnnnnnnnnnnnnnnnnnnnnnnnnnnnnnnnnnnnnnnnnnnnnnnnnnnnnnnnnnnnnnnnnnnnnnnnnnnnnnnnnnnnnnnnnnnnnnnnnnnnnnnnnnnnnnnnnnnnnnnnnnnnnnnnnnnnnnnnnnnnnnnnnnnnnnnnnnnnnnnnnnnnnnnnnnnnnnnnnnnnnnnnnnnnnnnnnnnnnnnnnnnnnnnnnnnnnnnnnnnnnnnnnnnnnnnnnnnnnnnnnnnnnnnnnnnnnnnnnnnnnnnnnnnnnnnnnnnnnnnnnnnnnnnnnnnnnnnnnnnnnnnnnnnnnnnnnnnnnnnnnnnnnnnnnnnnnnnnnnnnnnnnnnnnnnnnnnnnnnnnnnnnnnnnnnnnnnnnnnnnnnnnnnnnnnnnnnnnnnnnnnnnnnnnnnnnnnnnnnnnnnnnnnnnnnnnnnnnnnnnnnnnnnnnnnnnnnnnnnnnnnnnnnnnnnnnnnnnnnnnnnnnnnnnnnnnnnnnnnnnnnnnnnnnnnnnnnnnnnnnnnnnnnnnnnnnnnnnnnnnnnnnnnnnnnnnnnnnnnnnnnnnnnnnnnnnnnnnnnnnnnnnnnnnnnnnnnnnnnnnnnnnnnnnnnnnnnnnnnnnnnnnnnnnnnnnnnnnnnnnnnnnnnnnnnnnnnnnnnnnnnnnnnnnnnnnnnnnnnnnnnnnnnnnnnnnnnnnnnnnnnnnnnnnnnnnnnnnnnnnnnnnnnnnnnnnnnnnnnnnnnnnnnnnnnnnnnnnnnnnnnnnnnnnnnnnnnnnnnnnnnnnnnnnnnnnnnnnnnnnnnnnnnnnnnnnnnnnnnnnnnnnnnnnnnnnnnnnnnnnnnnnnnnnnnnnnnnnnnnnnnnnnnnnnnnnnnnnnnnnnnnnnnnnnnnnnnnnnnnnnnnnnnnnnnnnnnnnnnnnnnnnnnnnnnnnnnnnnnnnnnnnnnnnnnnnnnnnnnnnnnnnnnnnnnnnnnnnnnnnnnnnnnnnnnnnnnnnnnnnnnnnnnnnnnnnnnnnnnnnnnnnnnnnnnnnnnnnnnnnnnnnnnnnnnnnnnnnnnnnnnnnnnnnnnnnnnnnnnnnnnnnnnnnnnnnnnnnnnnnnnnnnnnnnnnnnnnnnnnnnnnnnnnnnnnnnnnnnnnnnnnnnnnnnnnnnnnnnnnnnnnnnnnnnnnnnnnnnnnnnnnnnnnnnnnnnnnnnnnnnnnnnnnnnnnnnnnnnnnnnnnnnnnnnnnnnnnnnnnnnnnnnnnnnnnnnnnnnnnnnnnnnnnnnnnnnnnnnnnnnnnnnnnnnnnnnnnnnnnnnnnnnnnnnnnnnnnnnnnnnnnnnnnnnnnnnnnnnnnnnnnnnnnnnnnnnnnnnnnnnnnnnnnnnnnnnnnnnnnnnnnnnnnnnnnnnnnnnnnnnnnnnnnnnnnnnnnnnnnnnnnnnnnnnnnnnnnnnnnnnnnnnnnnnnnnnnnnnnnnnnnnnnnnnnnnnnnnnnnnnnnnnnnnnnnnnnnnnnnnnnnnnnnnnnnnnnnnnnnnnnnnnnnnnnnnnnnnnnnnnnnnnnnnnnnnnnnnnnnnnnnnnnnnnnnnnnnnnnnnnnnnnnnnnnnnnnnnnnnnnnnnnnnnnnnnnnnnnnnnnnnnnnnnnnnnnnnnnnnnnnnnnnnnnnnnnnnnnnnnnnnnnnnnnnnnnnnnnnnnnnnnnnnnnnnnnnnnnnnnnnnnnnnnnnnnnnnnnnnnnnnnnnnnnnnnnnnnnnnnnnnnnnnnnnnnnnnnnnnnnnnnnnnnnnnnnnnnnnnnnnnnnnnnnnnnnnnnnnnnnnnnnnnnnnnnnnnnnnnnnnnnnnnnnnnnnnnnnnnnnnnnnnnnnnnnnnnnnnnnnnnnnnnnnnnnnnnnnnnnnnnnnnnnnnnnnnnnnnnnnnnnnnnnnnnnnnnnnnnnnnnnnnnnnnnnnnnnnnnnnnnnnnnnnnnnnnnnnnnnnnnnnnnnnnnnnnnnnnnnnnnnnnnnnnnnnnnnnnnnnnnnnnnnnnnnnnnnnnnnnnnnnnnnnnnnnnnnnnnnnnnnnnnnnnnnnnnnnnnnnnnnnnnnnnnnnnnnnnnnnnnnnnnnnnnnnnnnnnnnnnnnnnnnnnnnnnnnnnnnnnnnnnnnnnnnnnnnnnnnnnnnnnnnnnnnnnnnnnnnnnnnnnnnnnnnnnnnnnnnnnnnnnnnnnnnnnnnnnnnnnnnnnnnnnnnnnnnnnnnnnnnnnnnnnnnnnnnnnnnnnnnnnnnnnnnnnnnnnnnnnnnnnnnnnnnnnnnnnnnnnnnnnnnnnnnnnnnnnnnnnnnnnnnnnnnnnnnnnnnnnnnnnnnnnnnnnnnnnnnnnnnnnnnnnnnnnnnnnnnnnnnnnnnnnnnnnnnnnnnnnnnnnnnnnnnnnnnnnnnnnnnnnnnnnnnnnnnnnnnnnnnnnnnnnnnnnnnnnnnnnnnnnnnnnnnnnnnnnnnnnnnnnnnnnnnnnnnnnnnnnnnnnnnnnnnnnnnnnnnnnnnnnnnnnnnnnnnnnnnnnnnnnnnnnnnnnnnnnnnnnnnnnnnnnnnnnnnnnnnnnnnnnnnnnnnnnnnnnnnnnnnnnnnnnnnnnnnnnnnnnnnnnnnnnnnnnnnnnnnnnnnnnnnnnnnnnnnnnnnnnnnnnnnnnnnnnnnnnnnnnnnnnnnnnnnnnnnnnnnnnnnnnnnnnnnnnnnnnnnnnnnnnnnnnnnnnnnnnnnnnnnnnnnnnnnnnnnnnnnnnnnnnnnnnnnnnnnnnnnnnnnnnnnnnnnnnnnnnnnnnnnnnnnnnnnnnnnnnnnnnnnnnnnnnnnnnnnnnnnnnnnnnnnnnnnnnnnnnnnnnnnnnnnnnnnnnnnnnnnnnnnnnnnnnnnnnnnnnnnnnnnnnnnnnnnnnnnnnnnnnnnnnnnnnnnnnnnnnnnnnnnnnnnnnnnnnnnnnnnnnnnnnnnnnnnnnnnnnnnnnnnnnnnnnnnnnnnnnnnnnnnnnnnnnnnnnnnnnnnnnnnnnnnnnnnnnnnnnnnnnnnnnnnnnnnnnnnnnnnnnnnnnnnnnnnnnnnnnnnnnnnnnnnnnnnnnnnnnnnnnnnnnnnnnnnnnnnnnnnnnnnnnnnnnnnnnnnnnnnnnnnnnnnnnnnnnnnnnnnnnnnnnnnnnnnnnnnnnnnnnnnnnnnnnnnnnnnnnnnnnnnnnnnnnnnnnnnnnnnnnnnnnnnnnnnnnnnnnnnnnnnnnnnnnnnnnnnnnnnnnnnnnnnnnnnnnnnnnnnnnnnnnnnnnnnnnnnnnnnnnnnnnnnnnnnnnnnnnnnnnnnnnnnnnnnnnnnnnnnnnnnnnnnnnnnnnnnnnnnnnnnnnnnnnnnnnnnnnnnnnnnnnnnnnnnnnnnnnnnnnnnnnnnnnnnnnnnnnnnnnnnnnnnnnnnnnnnnnnnnnnnnnnnnnnnnnnnnnnnnnnnnnnnnnnnnnnnnnnnnnnnnnnnnnnnnnnnnnnnnnnnnnnnnnnnnnnnnnnnnnnnnnnnnnnnnnnnnnnnnnnnnnnnnnnnnnnnnnnnnnnnnnnnnnnnnnnnnnnnnnnnnnnnnnnnnnnnnnnnnnnnnnnnnnnnnnnnnnnnnnnnnnnnnnnnnnnnnnnnnnnnnnnnnnnnnnnnnnnnnnnnnnnnnnnnnnnnnnnnnnnnnnnnnnnnnnnnnnnnnnnnnnnnnnnnnnnnnnnnnnnnnnnnnnnnnnnnnnnnnnnnnnnnnnnnnnnnnnnnnnnnnnnnnnnnnnnnnnnnnnnnnnnnnnnnnnnnnnnnnnnnnnnnnnnnnnnnnnnnnnnnnnnnnnnnnnnnnnnnnnnnnnnnnnnnnnnnnnnnnnnnnnnnnnnnnnnnnnnnnnnnnnnnnnnnnnnnnnnnnnnnnnnnnnnnnnnnnnnnnnnnnnnnnnnnnnnnnnnnnnnnnnnnnnnnnnnnnnnnnnnnnnnnnnnnnnnnnnnnnnnnnnnnnnnnnnnnnnnnnnnnnnnnnnnnnnnnnnnnnnnnnnnnnnnnnnnnnnnnnnnnnnnnnnnnnnnnnnnnnnnnnnnnnnnnnnnnnnnnnnnnnnnnnnnnnnnnnnnnnnnnnnnnnnnnnnnnnnnnnnnnnnnnnnnnnnnnnnnnnnnnnnnnnnnnnnnnnnnnnnnnnnnnnnnnnnnnnnnnnnnnnnnnnnnnnnnnnnnnnnnnnnnnnnnnnnnnnnnnnnnnnnnnnnnnnnnnnnnnnnnnnnnnnnnnnnnnnnnnnnnnnnnnnnnnnnnnnnnnnnnnnnnnnnnnnnnnnnnnnnnnnnnnnnnnnnnnnnnnnnnnnnnnnnnnnnnnnnnnnnnnnnnnnnnnnnnnnnnnnnnnnnnnnnnnnnnnnnnnnnnnnnnnnnnnnnnnnnnnnnnnnnnnnnnnnnnnnnnnnnnnnnnnnnnnnnnnnnnnnnnnnnnnnnnnnnnnnnnnnnnnnnnnnnnnnnnnnnnnnnnnnnnnnnnnnnnnnnnnnnnnnnnnnnnnnnnnnnnnnnnnnnnnnnnnnnnnnnnnnnnnnnnnnnnnnnnnnnnnnnnnnnnnnnnnnnnnnnnnnnnnnnnnnnnnnnnnnnnnnnnnnnnnnnnnnnnnnnnnnnnnnnnnnnnnnnnnnnnnnnnnnnnnnnnnnnnnnnnnnnnnnnnnnnnnnnnnnnnnnnnnnnnnnnnnnnnnnnnnnnnnnnnnnnnnnnnnnnnnnnnnnnnnnnnnnnnnnnnnnnnnnnnnnnnnnnnnnnnnnnnnnnnnnnnnnnnnnnnnnnnnnnnnnnnnnnnnnnnnnnnnnnnnnnnnnnnnnnnnnnnnnnnnnnnnnnnnnnnnnnnnnnnnnnnnnnnnnnnnnnnnnnnnnnnnnnnnnnnnnnnnnnnnnnnnnnnnnnnnnnnnnnnnnnnnnnnnnnnnnnnnnnnnnnnnnnnnnnnnnnnnnnnnnnnnnnnnnnnnnnnnnnnnnnnnnnnnnnnnnnnnnnnnnnnnnnnnnnnnnnnnnnnnnnnnnnnnnnnnnnnnnnnnnnnnnnnnnnnnnnnnnnnnnnnnnnnnnnnnnnnnnnnnnnnnnnnnnnnnnnnnnnnnnnnnnnnnnnnnnnnnnnnnnnnnnnnnnnnnnnnnnnnnnnnnnnnnnnnnnnnnnnnnnnnnnnnnnnnnnnnnnnnnnnnnnnnnnnnnnnnnnnnnnnnnnnnnnnnnnnnnnnnnnnnnnnnnnnnnnnnnnnnnnnnnnnnnnnnnnnnnnnnnnnnnnnnnnnnnnnnnnnnnnnnnnnnnnnnnnnnnnnnnnnnnnnnnnnnnnnnnnnnnnnnnnnnnnnnnnnnnnnnnnnnnnnnnnnnnnnnnnnnnnnnnnnnnnnnnnnnnnnnnnnnnnnnnnnnnnnnnnnnnnnnnnnnnnnnnnnnnnnnnnnnnnnnnnnnnnnnnnnnnnnnnnnnnnnnnnnnnnnnnnnnnnnnnnnnnnnnnnnnnnnnnnnnnnnnnnnnnnnnnnnnnnnnnnnnnnnnnnnnnnnnnnnnnnnnnnnnnnnnnnnnnnnnnnnnnnnnnnnnnnnnnnnnnnnnnnnnnnnnnnnnnnnnnnnnnnnnnnnnnnnnnnnnnnnnnnnnnnnnnnnnnnnnnnnnnnnnnnnnnnnnnnnnnnnnnnnnnnnnnnnnnnnnnnnnnnnnnnnnnnnnnnnnnnnnnnnnnnnnnnnnnnnnnnnnnnnnnnnnnnnnnnnnnnnnnnnnnnnnnnnnnnnnnnnnnnnnnnnnnnnnnnnnnnnnnnnnnnnnnnnnnnnnnnnnnnnnnnnnnnnnnnnnnnnnnnnnnnnnnnnnnnnnnnnnnnnnnnnnnnnnnnnnnnnnnnnnnnnnnnnnnnnnnnnnnnnnnnnnnnnnnnnnnnnnnnnnnnnnnnnnnnnnnnnnnnnnnnnnnnnnnnnnnnnnnnnnnnnnnnnnnnnnnnnnnnnnnnnnnnnnnnnnnnnnnnnnnnnnnnnnnnnnnnnnnnnnnnnnnnnnnnnnnnnnnnnnnnnnnnnnnnnnnnnnnnnnnnnnnnnnnnnnnnnnnnnnnnnnnnnnnnnnnnnnnnnnnnnnnnnnnnnnnnnnnnnnnnnnnnnnnnnnnnnnnnnnnnnnnnnnnnnnnnnnnnnnnnnnnnnnnnnnnnnnnnnnnnnnnnnnnnnnnnnnnnnnnnnnnnnnnnnnnnnnnnnnnnnnnnnnnnnnnnnnnnnnnnnnnnnnnnnnnnnnnnnnnnnnnnnnnnnnnnnnnnnnnnnnnnnnnnnnnnnnnnnnnnnnnnnnnnnnnnnnnnnnnnnnnnnnnnnnnnnnnnnnnnnnnnnnnnnnnnnnnnnnnnnnnnnnnnnnnnnnnnnnnnnnnnnnnnnnnnnnnnnnnnnnnnnnnnnnnnnnnnnnnnnnnnnnnnnnnnnnnnnnnnnnnnnnnnnnnnnnnnnnnnnnnnnnnnnnnnnnnnnnnnnnnnnnnnnnnnnnnnnnnnnnnnnnnnnnnnnnnnnnnnnnnnnnnnnnnnnnnnnnnnnnnnnnnnnnnnnnnnnnnnnnnnnnnnnnnnnnnnnnnnnnnnnnnnnnnnnnnnnnnnnnnnnnnnnnnnnnnnnnnnnnnnnnnnnnnnnnnnnnnnnnnnnnnnnnnnnnnnnnnnnnnnnnnnnnnnnnnnnnnnnnnnnnnnnnnnnnnnnnnnnnnnnnnnnnnnnnnnnnnnnnnnnnnnnnnnnnnnnnnnnnnnnnnnnnnnnnnnnnnnnnnnnnnnnnnnnnnnnnnnnnnnnnnnnnnnnnnnnnnnnnnnnnnnnnnnnnnnnnnnnnnnnnnnnnnnnnnnnnnnnnnnnnnnnnnnnnnnnnnnnnnnnnnnnnnnnnnnnnnnnnnnnnnnnnnnnnnnnnnnnnnnnnnnnnnnnnnnnnnnnnnnnnnnnnnnnnnnnnnnnnnnnnnnnnnnnnnnnnnnnnnnnnnnnnnnnnnnnnnnnnnnnnnnnnnnnnnnnnnnnnnnnnnnnnnnnnnnnnnnnnnnnnnnnnnnnnnnnnnnnnnnnnnnnnnnnnnnnnnnnnnnnnnnnnnnnnnnnnnnnnnnnnnnnnnnnnnnnnnnnnnnnnnnnnnnnnnnnnnnnnnnnnnnnnnnnnnnnnnnnnnnnnnnnnnnnnnnnnnnnnnnnnnnnnnnnnnnnnnnnnnnnnnnnnnnnnnnnnnnnnnnnnnnnnnnnnnnnnnnnnnnnnnnnnnnnnnnnnnnnnnnnnnnnnnnnnnnnnnnnnnnnnnnnnnnnnnnnnnnnnnnnnnnnnnnnnnnnnnnnnnnnnnnnnnnnnnnnnnnnnnnnnnnnnnnnnnnnnnnnnnnnnnnnnnnnnnnnnnnnnnnnnnnnnnnnnnnnnnnnnnnnnnnnnnnnnnnnnnnnnnnnnnnnnnnnnnnnnnnnnnnnnnnnnnnnnnnnnnnnnnnnnnnnnnnnnnnnnnnnnnnnnnnnnnnnnnnnnnnnnnnnnnnnnnnnnnnnnnnnnnnnnnnnnnnnnnnnnnnnnnnnnnnnnnnnnnnnnnnnnnnnnnnnnnnnnnnnnnnnnnnnnnnnnnnnnnnnnnnnnnnnnnnnnnnnnnnnnnnnnnnnnnnnnnnnnnnnnnnnnnnnnnnnnnnnnnnnnnnnnnnnnnnnnnnnnnnnnnnnnnnnnnnnnnnnnnnnnnnnnnnnnnnnnnnnnnnnnnnnnnnnnnnnnnnnnnnnnnnnnnnnnnnnnnnnnnnnnnnnnnnnnnnnnnnnnnnnnnnnnnnnnnnnnnnnnnnnnnnnnnnnnnnnnnnnnnnnnnnnnnnnnnnnnnnnnnnnnnnnnnnnnnnnnnnnnnnnnnnnnnnnnnnnnnnnnnnnnnnnnnnnnnnnnnnnnnnnnnnnnnnnnnnnnnnnnnnnnnnnnnnnnnnnnnnnnnnnnnnnnnnnnnnnnnnnnnnnnnnnnnnnnnnnnnnnnnnnnnnnnnnnnnnnnnnnnnnnnnnnnnnnnnnnnnnnnnnnnnnnnnnnnnnnnnnnnnnnnnnnnnnnnnnnnnnnnnnnnnnnnnnnnnnnnnnnnnnnnnnnnnnnnnnnnnnnnnnnnnnnnnnnnnnnnnnnnnnnnnnnnnnnnnnnnnnnnnnnnnnnnnnnnnnnnnnnnnnnnnnnnnnnnnnnnnnnnnnnnnnnnnnnnnnnnnnnnnnnnnnnnnnnnnnnnnnnnnnnnnnnnnnnnnnnnnnnnnnnnnnnnnnnnnnnnnnnnnnnnnnnnnnnnnnnnnnnnnnnnnnnnnnnnnnnnnnnnnnnnnnnnnnnnnnnnnnnnnnnnnnnnnnnnnnnnnnnnnnnnnnnnnnnnnnnnnnnnnnnnnnnnnnnnnnnnnnnnnnnnnnnnnnnnnnnnnnnnnnnnnnnnnnnnnnnnnnnnnnnnnnnnnnnnnnnnnnnnnnnnnnnnnnnnnnnnnnnnnnnnnnnnnnnnnnnnnnnnnnnnnnnnnnnnnnnnnnnnnnnnnnnnnnnnnnnnnnnnnnnnnnnnnnnnnnnnnnnnnnnnnnnnnnnnnnnnnnnnnnnnnnnnnnnnnnnnnnnnnnnnnnnnnnnnnnnnnnnnnnnnnnnnnnnnnnnnnnnnnnnnnnnnnnnnnnnnnnnnnnnnnnnnnnnnnnnnnnnnnnnnnnnnnnnnnnnnnnnnnnnnnnnnnnnnnnnnnnnnnnnnnnnnnnnnnnnnnnnnnnnnnnnnnnnnnnnnnnnnnnnnnnnnnnnnnnnnnnnnnnnnnnnnnnnnnnnnnnnnnnnnnnnnnnnnnnnnnnnnnnnnnnnnnnnnnnnnnnnnnnnnnnnnnnnnnnnnnnnnnnnnnnnnnnnnnnnnnnnnnnnnnnnnnnnnnnnnnnnnnnnnnnnnnnnnnnnnnnnnnnnnnnnnnnnnnnnnnnnnnnnnnnnnnnnnnnnnnnnnnnnnnnnnnnnnnnnnnnnnnnnnnnnnnnnnnnnnnnnnnnnnnnnnnnnnnnnnnnnnnnnnnnnnnnnnnnnnnnnnnnnnnnnnnnnnnnnnnnnnnnnnnnnnnnnnnnnnnnnnnnnnnnnnnnnnnnnnnnnnnnnnnnnnnnnnnnnnnnnnnnnnnnnnnnnnnnnnnnnnnnnnnnnnnnnnnnnnnnnnnnnnnnnnnnnnnnnnnnnnnnnnnnnnnnnnnnnnnnnnnnnnnnnnnnnnnnnnnnnnnnnnnnnnnnnnnnnnnnnnnnnnnnnnnnnnnnnnnnnnnnnnnnnnnnnnnnnnnnnnnnnnnnnnnnnnnnnnnnnnnnnnnnnnnnnnnnnnnnnnnnnnnnnnnnnnnnnnnnnnnnnnnnnnnnnnnnnnnnnnnnnnnnnnnnnnnnnnnnnnnnnnnnnnnnnnnnnnnnnnnnnnnnnnnnnnnnnnnnnnnnnnnnnnnnnnnnnnnnnnnnnnnnnnnnnnnnnnnnnnnnnnnnnnnnnnnnnnnnnnnnnnnnnnnnnnnnnnnnnnnnnnnnnnnnnnnnnnnnnnnnnnnnnnnnnnnnnnnnnnnnnnnnnnnnnnnnnnnnnnnnnnnnnnnnnnnnnnnnnnnnnnnnnnnnnnnnnnnnnnnnnnnnnnnnnnnnnnnnnnnnnnnnnnnnnnnnnnnnnnnnnnnnnnnnnnnnnnnnnnnnnnnnnnnnnnnnnnnnnnnnnnnnnnnnnnnnnnnnnnnnnnnnnnnnnnnnnnnnnnnnnnnnnnnnnnnnnnnnnnnnnnnnnnnnnnnnnnnnnnnnnnnnnnnnnnnnnnnnnnnnnnnnnnnnnnnnnnnnnnnnnnnnnnnnnnnnnnnnnnnnnnnnnnnnnnnnnnnnnnnnnnnnnnnnnnnnnnnnnnnnnnnnnnnnnnnnnnnnnnnnnnnnnnnnnnnnnnnnnnnnnnnnnnnnnnnnnnnnnnnnnnnnnnnnnnnnnnnnnnnnnnnnnnnnnnnnnnnnnnnnnnnnnnnnnnnnnnnnnnnnnnnnnnnnnnnnnnnnnnnnnnnnnnnnnnnnnnnnnnnnnnnnnnnnnnnnnnnnnnnnnnnnnnnnnnnnnnnnnnnnnnnnnnnnnnnnnnnnnnnnnnnnnnnnnnnnnnnnnnnnnnnnnnnnnnnnnnnnnnnnnnnnnnnnnnnnnnnnnnnnnnnnnnnnnnnnnnnnnnnnnnnnnnnnnnnnnnnnnnnnnnnnnnnnnnnnnnnnnnnnnnnnnnnnnnnnnnnnnnnnnnnnnnnnnnnnnnnnnnnnnnnnnnnnnnnnnnnnnnnnnnnnnnnnnnnnnnnnnnnnnnnnnnnnnnnnnnnnnnnnnnnnnnnnnnnnnnnnnnnnnnnnnnnnnnnnnnnnnnnnnnnnnnnnnnnnnnnnnnnnnnnnnnnnnnnnnnnnnnnnnnnnnnnnnnnnnnnnnnnnnnnnnnnnnnnnnnnnnnnnnnnnnnnnnnnnnnnnnnnnnnnnnnnnnnnnnnnnnnnnnnnnnnnnnnnnnnnnnnnnnnnnnnnnnnnnnnnnnnnnnnnnnnnnnnnnnnnnnnnnnnnnnnnnnnnnnnnnnnnnnnnnnnnnnnnnnnnnnnnnnnnnnnnnnnnnnnnnnnnnnnnnnnnnnnnnnnnnnnnnnnnnnnnnnnnnnnnnnnnnnnnnnnnnnnnnnnnnnnnnnnnnnnnnnnnnnnnnnnnnnnnnnnnnnnnnnnnnnnnnnnnnnnnnnnnnnnnnnnnnnnnnnnnnnnnnnnnnnnnnnnnnnnnnnnnnnnnnnnnnnnnnnnnnnnnnnnnnnnnnnnnnnnnnnnnnnnnnnnnnnnnnnnnnnnnnnnnnnnnnnnnnnnnnnnnnnnnnnnnnnnnnnnnnnnnnnnnnnnnnnnnnnnnnnnnnnnnnnnnnnnnnnnnnnnnnnnnnnnnnnnnnnnnnnnnnnnnnnnnnnnnnnnnnnnnnnnnnnnnnnnnnnnnnnnnnnnnnnnnnnnnnnnnnnnnnnnnnnnnnnnnnnnnnnnnnnnnnnnnnnnnnnnnnnnnnnnnnnnnnnnnnnnnnnnnnnnnnnnnnnnnnnnnnnnnnnnnnnnnnnnnnnnnnnnnnnnnnnnnnnnnnnnnnnnnnnnnnnnnnnnnnnnnnnnnnnnnnnnnnnnnnnnnnnnnnnnnnnnnnnnnnnnnnnnnnnnnnnnnnnnnnnnnnnnnnnnnnnnnnnnnnnnnnnnnnnnnnnnnnnnnnnnnnnnnnnnnnnnnnnnnnnnnnnnnnnnnnnnnnnnnnnnnnnnnnnnnnnnnnnnnnnnnnnnnnnnnnnnnnnnnnnnnnnnnnnnnnnnnnnnnnnnnnnnnnnnnnnnnnnnnnnnnnnnnnnnnnnnnnnnnnnnnnnnnnnnnnnnnnnnnnnnnnnnnnnnnnnnnnnnnnnnnnnnnnnnnnnnnnnnnnnnnnnnnnnnnnnnnnnnnnnnnnnnnnnnnnnnnnnnnnnnnnnnnnnnnnnnnnnnnnnnnnnnnnnnnnnnnnnnnnnnnnnnnnnnnnnnnnnnnnnnnnnnnnnnnnnnnnnnnnnnnnnnnnnnnnnnnnnnnnnnnnnnnnnnnnnnnnnnnnnnnnnnnnnnnnnnnnnnnnnnnnnnnnnnnnnnnnnnnnnnnnnnnnnnnnnnnnnnnnnnnnnnnnnnnnnnnnnnnnnnnnnnnnnnnnnnnnnnnnnnnnnnnnnnnnnnnnnnnnnnnnnnnnnnnnnnnnnnnnnnnnnnnnnnnnnnnnnnnnnnnnnnnnnnnnnnnnnnnnnnnnnnnnnnnnnnnnnnnnnnnnnnnnnnnnnnnnnnnnnnnnnnnnnnnnnnnnnnnnnnnnnnnnnnnnnnnnnnnnnnnnnnnnnnnnnnnnnnnnnnnnnnnnnnnnnnnnnnnnnnnnnnnnnnnnnnnnnnnnnnnnnnnnnnnnnnnnnnnnnnnnnnnnnnnnnnnnnnnnnnnnnnnnnnnnnnnnnnnnnnnnnnnnnnnnnnnnnnnnnnnnnnnnnnnnnnnnnnnnnnnnnnnnnnnnnnnnnnnnnnnnnnnnnnnnnnnnnnnnnnnnnnnnnnnnnnnnnnnnnnnnnnnnnnnnnnnnnnnnnnnnnnnnnnnnnnnnnnnnnnnnnnnnnnnnnnnnnnnnnnnnnnnnnnnnnnnnnnnnnnnnnnnnnnnnnnnnnnnnnnnnnnnnnnnnnnnnnnnnnnnnnnnnnnnnnnnnnnnnnnnnnnnnnnnnnnnnnnnnnnnnnnnnnnnnnnnnnnnnnnnnnnnnnnnnnnnnnnnnnnnnnnnnnnnnnnnnnnnnnnnnnnnnnnnnnnnnnnnnnnnnnnnnnnnnnnnnnnnnnnnnnnnnnnnnnnnnnnnnnnnnnnnnnnnnnnnnnnnnnnnnnnnnnnnnnnnnnnnnnnnnnnnnnnnnnnnnnnnnnnnnnnnnnnnnnnnnnnnnnnnnnnnnnnnnnnnnnnnnnnnnnnnnnnnnnnnnnnnnnnnnnnnnnnnnnnnnnnnnnnnnnnnnnnnnnnnnnnnnnnnnnnnnnnnnnnnnnnnnnnnnnnnnnnnnnnnnnnnnnnnnnnnnnnnnnnnnnnnnnnnnnnnnnnnnnnnnnnnnnnnnnnnnnnnnnnnnnnnnnnnnnnnnnnnnnnnnnnnnnnnnnnnnnnnnnnnnnnnnnnnnnnnnnnnnnnnnnnnnnnnnnnnnnnnnnnnnnnnnnnnnnnnnnnnnnnnnnnnnnnnnnnnnnnnnnnnnnnnnnnnnnnnnnnnnnnnnnnnnnnnnnnnnnnnnnnnnnnnnnnnnnnnnnnnnnnnnnnnnnnnnnnnnnnnnnnnnnnnnnnnnnnnnnnnnnnnnnnnnnnnnnnnnnnnnnnnnnnnnnnnnnnnnnnnnnnnnnnnnnnnnnnnnnnnnnnnnnnnnnnnnnnnnnnnnnnnnnnnnnnnnnnnnnnnnnnnnnnnnnnnnnnnnnnnnnnnnnnnnnnnnnnnnnnnnnnnnnnnnnnnnnnnnnnnnnnnnnnnnnnnnnnnnnnnnnnnnnnnnnnnnnnnnnnnnnnnnnnnnnnnnnnnnnnnnnnnnnnnnnnnnnnnnnnnnnnnnnnnnnnnnnnnnnnnnnnnnnnnnnnnnnnnnnnnnnnnnnnnnnnnnnnnnnnnnnnnnnnnnnnnnnnnnnnnnnnnnnnnnnnnnnnnnnnnnnnnnnnnnnnnnnnnnnnnnnnnnnnnnnnnnnnnnnnnnnnnnnnnnnnnnnnnnnnnnnnnnnnnnnnnnnnnnnnnnnnnnnnnnnnnnnnnnnnnnnnnnnnnnnnnnnnnnnnnnnnnnnnnnnnnnnnnnnnnnnnnnnnnnnnnnnnnnnnnnnnnnnnnnnnnnnnnnnnnnnnnnnnnnnnnnnnnnnnnnnnnnnnnnnnnnnnnnnnnnnnnnnnnnnnnnnnnnnnnnnnnnnnnnnnnnnnnnnnnnnnnnnnnnnnnnnnnnnnnnnnnnnnnnnnnnnnnnnnnnnnnnnnnnnnnnnnnnnnnnnnnnnnnnnnnnnnnnnnnnnnnnnnnnnnnnnnnnnnnnnnnnnnnnnnnnnnnnnnnnnnnnnnnnnnnnnnnnnnnnnnnnnnnnnnnnnnnnnnnnnnnnnnnnnnnnnnnnnnnnnnnnnnnnnnnnnnnnnnnnnnnnnnnnnnnnnnnnnnnnnnnnnnnnnnnnnnnnnnnnnnnnnnnnnnnnnnnnnnnnnnnnnnnnnnnnnnnnnnnnnnnnnnnnnnnnnnnnnnnnnnnnnnnnnnnnnnnnnnnnnnnnnnnnnnnnnnnnnnnnnnnnnnnnnnnnnnnnnnnnnnnnnnnnnnnnnnnnnnnnnnnnnnnnnnnnnnnnnnnnnnnnnnnnnnnnnnnnnnnnnnnnnnnnnnnnnnnnnnnnnnnnnnnnnnnnnnnnnnnnnnnnnnnnnnnnnnnnnnnnnnnnnnnnnnnnnnnnnnnnnnnnnnnnnnnnnnnnnnnnnnnnnnnnnnnnnnnnnnnnnnnnnnnnnnnnnnnnnnnnnnnnnnnnnnnnnnnnnnnnnnnnnnnnnnnnnnnnnnnnnnnnnnnnnnnnnnnnnnnnnnnnnnnnnnnnnnnnnnnnnnnnnnnnnnnnnnnnnnnnnnnnnnnnnnnnnnnnnnnnnnnnnnnnnnnnnnnnnnnnnnnnnnnnnnnnnnnnnnnnnnnnnnnnnnnnnnnnnnnnnnnnnnnnnnnnnnnnnnnnnnnnnnnnnnnnnnnnnnnnnnnnnnnnnnnnnnnnnnnnnnnnnnnnnnnnnnnnnnnnnnnnnnnnnnnnnnnnnnnnnnnnnnnnnnnnnnnnnnnnnnnnnnnnnnnnnnnnnnnnnnnnnnnnnnnnnnnnnnnnnnnnnnnnnnnnnnnnnnnnnnnnnnnnnnnnnnnnnnnnnnnnnnnnnnnnnnnnnnnnnnnnnnnnnnnnnnnnnnnnnnnnnnnnnnnnnnnnnnnnnnnnnnnnnnnnnnnnnnnnnnnnnnnnnnnnnnnnnnnnnnnnnnnnnnnnnnnnnnnnnnnnnnnnnnnnnnnnnnnnnnnnnnnnnnnnnnnnnnnnnnnnnnnnnnnnnnnnnnnnnnnnnnnnnnnnnnnnnnnnnnnnnnnnnnnnnnnnnnnnnnnnnnnnnnnnnnnnnnnnnnnnnnnnnnnnnnnnnnnnnnnnnnnnnnnnnnnnnnnnnnnnnnnnnnnnnnnnnnnnnnnnnnnnnnnnnnnnnnnnnnnnnnnnnnnnnnnnnnnnnnnnnnnnnnnnnnnnnnnnnnnnnnnnnnnnnnnnnnnnnnnnnnnnnnnnnnnnnnnnnnnnnnnnnnnnnnnnnnnnnnnnnnnnnnnnnnnnnnnnnnnnnnnnnnnnnnnnnnnnnnnnnnnnnnnnnnnnnnnnnnnnnnnnnnnnnnnnnnnnnnnnnnnnnnnnnnnnnnnnnnnnnnnnnnnnnnnnnnnnnnnnnnnnnnnnnnnnnnnnnnnnnnnnnnnnnnnnnnnnnnnnnnnnnnnnnnnnnnnnnnnnnnnnnnnnnnnnnnnnnnnnnnnnnnnnnnnnnnnnnnnnnnnnnnnnnnnnnnnnnnnnnnnnnnnnnnnnnnnnnnnnnnnnnnnnnnnnnnnnnnnnnnnnnnnnnnnnnnnnnnnnnnnnnnnnnnnnnnnnnnnnnnnnnnnnnnnnnnnnnnnnnnnnnnnnnnnnnnnnnnnnnnnnnnnnnnnnnnnnnnnnnnnnnnnnnnnnnnnnnnnnnnnnnnnnnnnnnnnnnnnnnnnnnnnnnnnnnnnnnnnnnnnnnnnnnnnnnnnnnnnnnnnnnnnnnnnnnnnnnnnnnnnnnnnnnnnnnnnnnnnnnnnnnnnnnnnnnnnnnnnnnnnnnnnnnnnnnnnnnnnnnnnnnnnnnnnnnnnnnnnnnnnnnnnnnnnnnnnnnnnnnnnnnnnnnnnnnnnnnnnnnnnnnnnnnnnnnnnnnnnnnnnnnnnnnnnnnnnnnnnnnnnnnnnnnnnnnnnnnnnnnnnnnnnnnnnnnnnnnnnnnnnnnnnnnnnnnnnnnnnnnnnnnnnnnnnnnnnnnnnnnnnnnnnnnnnnnnnnnnnnnnnnnnnnnnnnnnnnnnnnnnnnnnnnnnnnnnnnnnnnnnnnnnnnnnnnnnnnnnnnnnnnnnnnnnnnnnnnnnnnnnnnnnnnnnnnnnnnnnnnnnnnnnnnnnnnnnnnnnnnnnnnnnnnnnnnnnnnnnnnnnnnnnnnnnnnnnnnnnnnnnnnnnnnnnnnnnnnnnnnnnnnnnnnnnnnnnnnnnnnnnnnnnnnnnnnnnnnnnnnnnnnnnnnnnnnnnnnnnnnnnnnnnnnnnnnnnnnnnnnnnnnnnnnnnnnnnnnnnnnnnnnnnnnnnnnnnnnnnnnnnnnnnnnnnnnnnnnnnnnnnnnnnnnnnnnnnnnnnnnnnnnnnnnnnnnnnnnnnnnnnnnnnnnnnnnnnnnnnnnnnnnnnnnnnnnnnnnnnnnnnnnnnnnnnnnnnnnnnnnnnnnnnnnnnnnnnnnnnnnnnnnnnnnnnnnnnnnnnnnnnnnnnnnnnnnnnnnnnnnnnnnnnnnnnnnnnnnnnnnnnnnnnnnnnnnnnnnnnnnnnnnnnnnnnnnnnnnnnnnnnnnnnnnnnnnnnnnnnnnnnnnnnnnnnnnnnnnnnnnnnnnnnnnnnnnnnnnnnnnnnnnnnnnnnnnnnnnnnnnnnnnnnnnnnnnnnnnnnnnnnnnnnnnnnnnnnnnnnnnnnnnnnnnnnnnnnnnnnnnnnnnnnnnnnnnnnnnnnnnnnnnnnnnnnnnnnnnnnnnnnnnnnnnnnnnnnnnnnnnnnnnnnnnnnnnnnnnnnnnnnnnnnnnnnnnnnnnnnnnnnnnnnnnnnnnnnnnnnnnnnnnnnnnnnnnnnnnnnnnnnnnnnnnnnnnnnnnnnnnnnnnnnnnnnnnnnnnnnnnnnnnnnnnnnnnnnnnnnnnnnnnnnnnnnnnnnnnnnnnnnnnnnnnnnnnnnnnnnnnnnnnnnnnnnnnnnnnnnnnnnnnnnnnnnnnnnnnnnnnnnnnnnnnnnnnnnnnnnnnnnnnnnnnnnnnnnnnnnnnnnnnnnnnnnnnnnnnnnnnnnnnnnnnnnnnnnnnnnnnnnnnnnnnnnnnnnnnnnnnnnnnnnnnnnnnnnnnnnnnnnnnnnnnnnnnnnnnnnnnnnnnnnnnnnnnnnnnnnnnnnnnnnnnnnnnnnnnnnnnnnnnnnnnnnnnnnnnnnnnnnnnnnnnnnnnnnnnnnnnnnnnnnnnnnnnnnnnnnnnnnnnnnnnnnnnnnnnnnnnnnnnnnnnnnnnnnnnnnnnnnnnnnnnnnnnnnnnnnnnnnnnnnnnnnnnnnnnnnnnnnnnnnnnnnnnnnnnnnnnnnnnnnnnnnnnnnnnnnnnnnnnnnnnnnnnnnnnnnnnnnnnnnnnnnnnnnnnnnnnnnnnnnnnnnnnnnnnnnnnnnnnnnnnnnnnnnnnnnnnnnnnnnnnnnnnnnnnnnnnnnnnnnnnnnnnnnnnnnnnnnnnnnnnnnnnnnnnnnnnnnnnnnnnnnnnnnnnnnnnnnnnnnnnnnnnnnnnnnnnnnnnnnnnnnnnnnnnnnnnnnnnnnnnnnnnnnnnnnnnnnnnnnnnnnnnnnnnnnnnnnnnnnnnnnnnnnnnnnnnnnnnnnnnnnnnnnnnnnnnnnnnnnnnnnnnnnnnnnnnnnnnnnnnnnnnnnnnnnnnnnnnnnnnnnnnnnnnnnnnnnnnnnnnnnnnnnnnnnnnnnnnnnnnnnnnnnnnnnnnnnnnnnnnnnnnnnnnnnnnnnnnnnnnnnnnnnnnnnnnnnnnnnnnnnnnnnnnnnnnnnnnnnnnnnnnnnnnnnnnnnnnnnnnnnnnnnnnnnnnnnnnnnnnnnnnnnnnnnnnnnnnnnnnnnnnnnnnnnnnnnnnnnnnnnnnnnnnnnnnnnnnnnnnnnnnnnnnnnnnnnnnnnnnnnnnnnnnnnnnnnnnnnnnnnnnnnnnnnnnnnnnnnnnnnnnnnnnnnnnnnnnnnnnnnnnnnnnnnnnnnnnnnnnnnnnnnnnnnnnnnnnnnnnnnnnnnnnnnnnnnnnnnnnnnnnnnnnnnnnnnnnnnnnnnnnnnnnnnnnnnnnnnnnnnnnnnnnnnnnnnnnnnnnnnnnnnnnnnnnnnnnnnnnnnnnnnnnnnnnnnnnnnnnnnnnnnnnnnnnnnnnnnnnnnnnnnnnnnnnnnnnnnnnnnnnnnnnnnnnnnnnnnnnnnnnnnnnnnnnnnnnnnnnnnnnnnnnnnnnnnnnnnnnnnnnnnnnnnnnnnnnnnnnnnnnnnnnnnnnnnnnnnnnnnnnnnnnnnnnnnnnnnnnnnnnnnnnnnnnnnnnnnnnnnnnnnnnnnnnnnnnnnnnnnnnnnnnnnnnnnnnnnnnnnnnnnnnnnnnnnnnnnnnnnnnnnnnnnnnnnnnnnnnnnnnnnnnnnnnnnnnnnnnnnnnnnnnnnnnnnnnnnnnnnnnnnnnnnnnnnnnnnnnnnnnnnnnnnnnnnnnnnnnnnnnnnnnnnnnnnnnnnnnnnnnnnnnnnnnnnnnnnnnnnnnnnnnnnnnnnnnnnnnnnnnnnnnnnnnnnnnnnnnnnnnnnnnnnnnnnnnnnnnnnnnnnnnnnnnnnnnnnnnnnnnnnnnnnnnnnnnnnnnnnnnnnnnnnnnnnnnnnnnnnnnnnnnnnnnnnnnnnnnnnnnnnnnnnnnnnnnnnnnnnnnnnnnnnnnnnnnnnnnnnnnnnnnnnnnnnnnnnnnnnnnnnnnnnnnnnnnnnnnnnnnnnnnnnnnnnnnnnnnnnnnnnnnnnnnnnnnnnnnnnnnnnnnnnnnnnnnnnnnnnnnnnnnnnnnnnnnnnnnnnnnnnnnnnnnnnnnnnnnnnnnnnnnnnnnnnnnnnnnnnnnnnnnnnnnnnnnnnnnnnnnnnnnnnnnnnnnnnnnnnnnnnnnnnnnnnnnnnnnnnnnnnnnnnnnnnnnnnnnnnnnnnnnnnnnnnnnnnnnnnnnnnnnnnnnnnnnnnnnnnnnnnnnnnnnnnnnnnnnnnnnnnnnnnnnnnnnnnnnnnnnnnnnnnnnnnnnnnnnnnnnnnnnnnnnnnnnnnnnnnnnnnnnnnnnnnnnnnnnnnnnnnnnnnnnnnnnnnnnnnnnnnnnnnnnnnnnnnnnnnnnnnnnnnnnnnnnnnnnnnnnnnnnnnnnnnnnnnnnnnnnnnnnnnnnnnnnnnnnnnnnnnnnnnnnnnnnnnnnnnnnnnnnnnnnnnnnnnnnnnnnnnnnnnnnnnnnnnnnnnnnnnnnnnnnnnnnnnnnnnnnnnnnnnnnnnnnnnnnnnnnnnnnnnnnnnnnnnnnnnnnnnnnnnnnnnnnnnnnnnnnnnnnnnnnnnnnnnnnnnnnnnnnnnnnnnnnnnnnnnnnnnnnnnnnnnnnnnnnnnnnnnnnnnnnnnnnnnnnnnnnnnnnnnnnnnnnnnnnnnnnnnnnnnnnnnnnnnnnnnnnnnnnnnnnnnnnnnnnnnnnnnnnnnnnnnnnnnnnnnnnnnnnnnnnnnnnnnnnnnnnnnnnnnnnnnnnnnnnnnnnnnnnnnnnnnnnnnnnnnnnnnnnnnnnnnnnnnnnnnnnnnnnnnnnnnnnnnnnnnnnnnnnnnnnnnnnnnnnnnnnnnnnnnnnnnnnnnnnnnnnnnnnnnnnnnnnnnnnnnnnnnnnnnnnnnnnnnnnnnnnnnnnnnnnnnnnnnnnnnnnnnnnnnnnnnnnnnnnnnnnnnnnnnnnnnnnnnnnnnnnnnnnnnnnnnnnnnnnnnnnnnnnnnnnnnnnnnnnnnnnnnnnnnnnnnnnnnnnnnnnnnnnnnnnnnnnnnnnnnnnnnnnnnnnnnnnnnnnnnnnnnnnnnnnnnnnnnnnnnnnnnnnnnnnnnnnnnnnnnnnnnnnnnnnnnnnnnnnnnnnnnnnnnnnnnnnnnnnnnnnnnnnnnnnnnnnnnnnnnnnnnnnnnnnnnnnnnnnnnnnnnnnnnnnnnnnnnnnnnnnnnnnnnnnnnnnnnnnnnnnnnnnnnnnnnnnnnnnnnnnnnnnnnnnnnnnnnnnnnnnnnnnnnnnnnnnnnnnnnnnnnnnnnnnnnnnnnnnnnnnnnnnnnnnnnnnnnnnnnnnnnnnnnnnnnnnnnnnnnnnnnnnnnnnnnnnnnnnnnnnnnnnnnnnnnnnnnnnnnnnnnnnnnnnnnnnnnnnnnnnnnnnnnnnnnnnnnnnnnnnnnnnnnnnnnnnnnnnnnnnnnnnnnnnnnnnnnnnnnnnnnnnnnnnnnnnnnnnnnnnnnnnnnnnnnnnnnnnnnnnnnnnnnnnnnnnnnnnnnnnnnnnnnnnnnnnnnnnnnnnnnnnnnnnnnnnnnnnnnnnnnnnnnnnnnnnnnnnnnnnnnnnnnnnnnnnnnnnnnnnnnnnnnnnnnnnnnnnnnnnnnnnnnnnnnnnnnnnnnnnnnnnnnnnnnnnnnnnnnnnnnnnnnnnnnnnnnnnnnnnnnnnnnnnnnnnnnnnnnnnnnnnnnnnnnnnnnnnnnnnnnnnnnnnnnnnnnnnnnnnnnnnnnnnnnnnnnnnnnnnnnnnnnnnnnnnnnnnnnnnnnnnnnnnnnnnnnnnnnnnnnnnnnnnnnnnnnnnnnnnnnnnnnnnnnnnnnnnnnnnnnnnnnnnnnnnnnnnnnnnnnnnnnnnnnnnnnnnnnnnnnnnnnnnnnnnnnnnnnnnnnnnnnnnnnnnnnnnnnnnnnnnnnnnnnnnnnnnnnnnnnnnnnnnnnnnnnnnnnnnnnnnnnnnnnnnnnnnnnnnnnnnnnnnnnnnnnnnnnnnnnnnnnnnnnnnnnnnnnnnnnnnnnnnnnnnnnnnnnnnnnnnnnnnnnnnnnnnnnnnnnnnnnnnnnnnnnnnnnnnnnnnnnnnnnnnnnnnnnnnnnnnnnnnnnnnnnnnnnnnnnnnnnnnnnnnnnnnnnnnnnnnnnnnnnnnnnnnnnnnnnnnnnnnnnnnnnnnnnnnnnnnnnnnnnnnnnnnnnnnnnnnnnnnnnnnnnnnnnnnnnnnnnnnnnnnnnnnnnnnnnnnnnnnnnnnnnnnnnnnnnnnnnnnnnnnnnnnnnnnnnnnnnnnnnnnnnnnnnnnnnnnnnnnnnnnnnnnnnnnnnnnnnnnnnnnnnnnnnnnnnnnnnnnnnnnnnnnnnnnnnnnnnnnnnnnnnnnnnnnnnnnnnnnnnnnnnnnnnnnnnnnnnnnnnnnnnnnnnnnnnnnnnnnnnnnnnnnnnnnnnnnnnnnnnnnnnnnnnnnnnnnnnnnnnnnnnnnnnnnnnnnnnnnnnnnnnnnnnnnnnnnnnnnnnnnnnnnnnnnnnnnnnnnnnnnnnnnnnnnnnnnnnnnnnnnnnnnnnnnnnnnnnnnnnnnnnnnnnnnnnnnnnnnnnnnnnnnnnnnnnnnnnnnnnnnnnnnnnnnnnnnnnnnnnnnnnnnnnnnnnnnnnnnnnnnnnnnnnnnnnnnnnnnnnnnnnnnnnnnnnnnnnnnnnnnnnnnnnnnnnnnnnnnnnnnnnnnnnnnnnnnnnnnnnnnnnnnnnnnnnnnnnnnnnnnnnnnnnnnnnnnnnnnnnnnnnnnnnnnnnnnnnnnnnnnnnnnnnnnnnnnnnnnnnnnnnnnnnnnnnnnnnnnnnnnnnnnnnnnnnnnnnnnnnnnnnnnnnnnnnnnnnnnnnnnnnnnnnnnnnnnnnnnnnnnnnnnnnnnnnnnnnnnnnnnnnnnnnnnnnnnnnnnnnnnnnnnnnnnnnnnnnnnnnnnnnnnnnnnnnnnnnnnnnnnnnnnnnnnnnnnnnnnnnnnnnnnnnnnnnnnnnnnnnnnnnnnnnnnnnnnnnnnnnnnnnnnnnnnnnnnnnnnnnnnnnnnnnnnnnnnnnnnnnnnnnnnnnnnnnnnnnnnnnnnnnnnnnnnnnnnnnnnnnnnnnnnnnnnnnnnnnnnnnnnnnnnnnnnnnnnnnnnnnnnnnnnnnnnnnnnnnnnnnnnnnnnnnnnnnnnnnnnnnnnnnnnnnnnnnnnnnnnnnnnnnnnnnnnnnnnnnnnnnnnnnnnnnnnnnnnnnnnnnnnnnnnnnnnnnnnnnnnnnnnnnnnnnnnnnnnnnnnnnnnnnnnnnnnnnnnnnnnnnnnnnnnnnnnnnnnnnnnnnnnnnnnnnnnnnnnnnnnnnnnnnnnnnnnnnnnnnnnnnnnnnnnnnnnnnnnnnnnnnnnnnnnnnnnnnnnnnnnnnnnnnnnnnnnnnnnnnnnnnnnnnnnnnnnnnnnnnnnnnnnnnnnnnnnnnnnnnnnnnnnnnnnnnnnnnnnnnnnnnnnnnnnnnnnnnnnnnnnnnnnnnnnnnnnnnnnnnnnnnnnnnnnnnnnnnnnnnnnnnnnnnnnnnnnnnnnnnnnnnnnnnnnnnnnnnnnnnnnnnnnnnnnnnnnnnnnnnnnnnnnnnnnnnnnnnnnnnnnnnnnnnnnnnnnnnnnnnnnnnnnnnnnnnnnnnnnnnnnnnnnnnnnnnnnnnnnnnnnnnnnnnnnnnnnnnnnnnnnnnnnnnnnnnnnnnnnnnnnnnnnnnnnnnnnnnnnnnnnnnnnnnnnnnnnnnnnnnnnnnnnnnnnnnnnnnnnnnnnnnnnnnnnnnnnnnnnnnnnnnnnnnnnnnnnnnnnnnnnnnnnnnnnnnnnnnnnnnnnnnnnnnnnnnnnnnnnnnnnnnnnnnnnnnnnnnnnnnnnnnnnnnnnnnnnnnnnnnnnnnnnnnnnnnnnnnnnnnnnnnnnnnnnnnnnnnnnnnnnnnnnnnnnnnnnnnnnnnnnnnnnnnnnnnnnnnnnnnnnnnnnnnnnnnnnnnnnnnnnnnnnnnnnnnnnnnnnnnnnnnnnnnnnnnnnnnnnnnnnnnnnnnnnnnnnnnnnnnnnnnnnnnnnnnnnnnnnnnnnnnnnnnnnnnnnnnnnnnnnnnnnnnnnnnnnnnnnnnnnnnnnnnnnnnnnnnnnnnnnnnnnnnnnnnnnnnnnnnnnnnnnnnnnnnnnnnnnnnnnnnnnnnnnnnnnnnnnnnnnnnnnnnnnnnnnnnnnnnnnnnnnnnnnnnnnnnnnnnnnnnnnnnnnnnnnnnnnnnnnnnnnnnnnnnnnnnnnnnnnnnnnnnnnnnnnnnnnnnnnnnnnnnnnnnnnnnnnnnnnnnnnnnnnnnnnnnnnnnnnnnnnnnnnnnnnnnnnnnnnnnnnnnnnnnnnnnnnnnnnnnnnnnnnnnnnnnnnnnnnnnnnnnnnnnnnnnnnnnnnnnnnnnnnnnnnnnnnnnnnnnnnnnnnnnnnnnnnnnnnnnnnnnnnnnnnnnnnnnnnnnnnnnnnnnnnnnnnnnnnnnnnnnnnnnnnnnnnnnnnnnnnnnnnnnnnnnnnnnnnnnnnnnnnnnnnnnnnnnnnnnnnnnnnnnnnnnnnnnnnnnnnnnnnnnnnnnnnnnnnnnnnnnnnnnnnnnnnnnnnnnnnnnnnnnnnnnnnnnnnnnnnnnnnnnnnnnnnnnnnnnnnnnnnnnnnnnnnnnnnnnnnnnnnnnnnnnnnnnnnnnnnnnnnnnnnnnnnnnnnnnnnnnnnnnnnnnnnnnnnnnnnnnnnnnnnnnnnnnnnnnnnnnnnnnnnnnnnnnnnnnnnnnnnnnnnnnnnnnnnnnnnnnnnnnnnnnnnnnnnnnnnnnnnnnnnnnnnnnnnnnnnnnnnnnnnnnnnnnnnnnnnnnnnnnnnnnnnnnnnnnnnnnnnnnnnnnnnnnnnnnnnnnnnnnnnnnnnnnnnnnnnnnnnnnnnnnnnnnnnnnnnnnnnnnnnnnnnnnnnnnnnnnnnnnnnnnnnnnnnnnnnnnnnnnnnnnnnnnnnnnnnnnnnnnnnnnnnnnnnnnnnnnnnnnnnnnnnnnnnnnnnnnnnnnnnnnnnnnnnnnnnnnnnnnnnnnnnnnnnnnnnnnnnnnnnnnnnnnnnnnnnnnnnnnnnnnnnnnnnnnnnnnnnnnnnnnnnnnnnnnnnnnnnnnnnnnnnnnnnnnnnnnnnnnnnnnnnnnnnnnnnnnnnnnnnnnnnnnnnnnnnnnnnnnnnnnnnnnnnnnnnnnnnnnnnnnnnnnnnnnnnnnnnnnnnnnnnnnnnnnnnnnnnnnnnnnnnnnnnnnnnnnnnnnnnnnnnnnnnnnnnnnnnnnnnnnnnnnnnnnnnnnnnnnnnnnnnnnnnnnnnnnnnnnnnnnnnnnnnnnnnnnnnnnnnnnnnnnnnnnnnnnnnnnnnnnnnnnnnnnnnnnnnnnnnnnnnnnnnnnnnnnnnnnnnnnnnnnnnnnnnnnnnnnnnnnnnnnnnnnnnnnnnnnnnnnnnnnnnnnnnnnnnnnnnnnnnnnnnnnnnnnnnnnnnnnnnnnnnnnnnnnnnnnnnnnnnnnnnnnnnnnnnnnnnnnnnnnnnnnnnnnnnnnnnnnnnnnnnnnnnnnnnnnnnnnnnnnnnnnnnnnnnnnnnnnnnnnnnnnnnnnnnnnnnnnnnnnnnnnnnnnnnnnnnnnnnnnnnnnnnnnnnnnnnnnnnnnnnnnnnnnnnnnnnnnnnnnnnnnnnnnnnnnnnnnnnnnnnnnnnnnnnnnnnnnnnnnnnnnnnnnnnnnnnnnnnnnnnnnnnnnnnnnnnnnnnnnnnnnnnnnnnnnnnnnnnnnnnnnnnnnnnnnnnnnnnnnnnnnnnnnnnnnnnnnnnnnnnnnnnnnnnnnnnnnnnnnnnnnnnnnnnnnnnnnnnnnnnnnnnnnnnnnnnnnnnnnnnnnnnnnnnnnnnnnnnnnnnnnnnnnnnnnnnnnnnnnnnnnnnnnnnnnnnnnnnnnnnnnnnnnnnnnnnnnnnnnnnnnnnnnnnnnnnnnnnnnnnnnnnnnnnnnnnnnnnnnnnnnnnnnnnnnnnnnnnnnnnnnnnnnnnnnnnnnnnnnnnnnnnnnnnnnnnnnnnnnnnnnnnnnnnnnnnnnnnnnnnnnnnnnnnnnnnnnnnnnnnnnnnnnnnnnnnnnnnnnnnnnnnnnnnnnnnnnnnnnnnnnnnnnnnnnnnnnnnnnnnnnnnnnnnnnnnnnnnnnnnnnnnnnnnnnnnnnnnnnnnnnnnnnnnnnnnnnnnnnnnnnnnnnnnnnnnnnnnnnnnnnnnnnnnnnnnnnnnnnnnnnnnnnnnnnnnnnnnnnnnnnnnnnnnnnnnnnnnnnnnnnnnnnnnnnnnnnnnnnnnnnnnnnnnnnnnnnnnnnnnnnnnnnnnnnnnnnnnnnnnnnnnnnnnnnnnnnnnnnnnnnnnnnnnnnnnnnnnnnnnnnnnnnnnnnnnnnnnnnnnnnnnnnnnnnnnnnnnnnnnnnnnnnnnnnnnnnnnnnnnnnnnnnnnnnnnnnnnnnnnnnnnnnnnnnnnnnnnnnnnnnnnnnnnnnnnnnnnnnnnnnnnnnnnnnnnnnnnnnnnnnnnnnnnnnnnnnnnnnnnnnnnnnnnnnnnnnnnnnnnnnnnnnnnnnnnnnnnnnnnnnnnnnnnnnnnnnnnnnnnnnnnnnnnnnnnnnnnnnnnnnnnnnnnnnnnnnnnnnnnnnnnnnnnnnnnnnnnnnnnnnnnnnnnnnnnnnnnnnnnnnnnnnnnnnnnnnnnnnnnnnnnnnnnnnnnnnnnnnnnnnnnnnnnnnnnnnnnnnnnnnnnnnnnnnnnnnnnnnnnnnnnnnnnnnnnnnnnnnnnnnnnnnnnnnnnnnnnnnnnnnnnnnnnnnnnnnnnnnnnnnnnnnnnnnnnnnnnnnnnnnnnnnnnnnnnnnnnnnnnnnnnnnnnnnnnnnnnnnnnnnnnnnnnnnnnnnnnnnnnnnnnnnnnnnnnnnnnnnnnnnnnnnnnnnnnnnnnnnnnnnnnnnnnnnnnnnnnnnnnnnnnnnnnnnnnnnnnnnnnnnnnnnnnnnnnnnnnnnnnnnnnnnnnnnnnnnnnnnnnnnnnnnnnnnnnnnnnnnnnnnnnnnnnnnnnnnnnnnnnnnnnnnnnnnnnnnnnnnnnnnnnnnnnnnnnnnnnnnnnnnnnnnnnnnnnnnnnnnnnnnnnnnnnnnnnnnnnnnnnnnnnnnnnnnnnnnnnnnnnnnnnnnnnnnnnnnnnnnnnnnnnnnnnnnnnnnnnnnnnnnnnnnnnnnnnnnnnnnnnnnnnnnnnnnnnnnnnnnnnnnnnnnnnnnnnnnnnnnnnnnnnnnnnnnnnnnnnnnnnnnnnnnnnnnnnnnnnnnnnnnnnnnnnnnnnnnnnnnnnnnnnnnnnnnnnnnnnnnnnnnnnnnnnnnnnnnnnnnnnnnnnnnnnnnnnnnnnnnnnnnnnnnnnnnnnnnnnnnnnnnnnnnnnnnnnnnnnnnnnnnnnnnnnnnnnnnnnnnnnnnnnnnnnnnnnnnnnnnnnnnnnnnnnnnnnnnnnnnnnnnnnnnnnnnnnnnnnnnnnnnnnnnnnnnnnnnnnnnnnnnnnnnnnnnnnnnnnnnnnnnnnnnnnnnnnnnnnnnnnnnnnnnnnnnnnnnnnnnnnnnnnnnnnnnnnnnnnnnnnnnnnnnnnnnnnnnnnnnnnnnnnnnnnnnnnnnnnnnnnnnnnnnnnnnnnnnnnnnnnnnnnnnnnnnnnnnnnnnnnnnnnnnnnnnnnnnnnnnnnnnnnnnnnnnnnnnnnnnnnnnnnnnnnnnnnnnnnnnnnnnnnnnnnnnnnnnnnnnnnnnnnnnnnnnnnnnnnnnnnnnnnnnnnnnnnnnnnnnnnnnnnnnnnnnnnnnnnnnnnnnnnnnnnnnnnnnnnnnnnnnnnnnnnnnnnnnnnnnnnnnnnnnnnnnnnnnnnnnnnnnnnnnnnnnnnnnnnnnnnnnnnnnnnnnnnnnnnnnnnnnnnnnnnnnnnnnnnnnnnnnnnnnnnnnnnnnnnnnnnnnnnnnnnnnnnnnnnnnnnnnnnnnnnnnnnnnnnnnnnnnnnnnnnnnnnnnnnnnnnnnnnnnnnnnnnnnnnnnnnnnnnnnnnnnnnnnnnnnnnnnnnnnnnnnnnnnnnnnnnnnnnnnnnnnnnnnnnnnnnnnnnnnnnnnnnnnnnnnnnnnnnnnnnnnnnnnnnnnnnnnnnnnnnnnnnnnnnnnnnnnnnnnnnnnnnnnnnnnnnnnnnnnnnnnnnnnnnnnnnnnnnnnnnnnnnnnnnnnnnnnnnnnnnnnnnnnnnnnnnnnnnnnnnnnnnnnnnnnnnnnnnnnnnnnnnnnnnnnnnnnnnnnnnnnnnnnnnnnnnnnnnnnnnnnnnnnnnnnnnnnnnnnnnnnnnnnnnnnnnnnnnnnnnnnnnnnnnnnnnnnnnnnnnnnnnnnnnnnnnnnnnnnnnnnnnnnnnnnnnnnnnnnnnnnnnnnnnnnnnnnnnnnnnnnnnnnnnnnnnnnnnnnnnnnnnnnnnnnnnnnnnnnnnnnnnnnnnnnnnnnnnnnnnnnnnnnnnnnnnnnnnnnnnnnnnnnnnnnnnnnnnnnnnnnnnnnnnnnnnnnnnnnnnnnnnnnnnnnnnnnnnnnnnnnnnnnnnnnnnnnnnnnnnnnnnnnnnnnnnnnnnnnnnnnnnnnnnnnnnnnnnnnnnnnnnnnnnnnnnnnnnnnnnnnnnnnnnnnnnnnnnnnnnnnnnnnnnnnnnnnnnnnnnnnnnnnnnnnnnnnnnnnnnnnnnnnnnnnnnnnnnnnnnnnnnnnnnnnnnnnnnnnnnnnnnnnnnnnnnnnnnnnnnnnnnnnnnnnnnnnnnnnnnnnnnnnnnnnnnnnnnnnnnnnnnnnnnnnnnnnnnnnnnnnnnnnnnnnnnnnnnnnnnnnnnnnnnnnnnnnnnnnnnnnnnnnnnnnnnnnnnnnnnnnnnnnnnnnnnnnnnnnnnnnnnnnnnnnnnnnnnnnnnnnnnnnnnnnnnnnnnnnnnnnnnnnnnnnnnnnnnnnnnnnnnnnnnnnnnnnnnnnnnnnnnnnnnnnnnnnnnnnnnnnnnnnnnnnnnnnnnnnnnnnnnnnnnnnnnnnnnnnnnnnnnnnnnnnnnnnnnnnnnnnnnnnnnnnnnnnnnnnnnnnnnnnnnnnnnnnnnnnnnnnnnnnnnnnnnnnnnnnnnnnnnnnnnnnnnnnnnnnnnnnnnnnnnnnnnnnnnnnnnnnnnnnnnnnnnnnnnnnnnnnnnnnnnnnnnnnnnnnnnnnnnnnnnnnnnnnnnnnnnnnnnnnnnnnnnnnnnnnnnnnnnnnnnnnnnnnnnnnnnnnnnnnnnnnnnnnnnnnnnnnnnnnnnnnnnnnnnnnnnnnnnnnnnnnnnnnnnnnnnnnnnnnnnnnnnnnnnnnnnnnnnnnnnnnnnnnnnnnnnnnnnnnnnnnnnnnnnnnnnnnnnnnnnnnnnnnnnnnnnnnnnnnnnnnnnnnnnnnnnnnnnnnnnnnnnnnnnnnnnnnnnnnnnnnnnnnnnnnnnnnnnnnnnnnnnnnnnnnnnnnnnnnnnnnnnnnnnnnnnnnnnnnnnnnnnnnnnnnnnnnnnnnnnnnnnnnnnnnnnnnnnnnnnnnnnnnnnnnnnnnnnnnnnnnnnnnnnnnnnnnnnnnnnnnnnnnnnnnnnnnnnnnnnnnnnnnnnnnnnnnnnnnnnnnnnnnnnnnnnnnnnnnnnnnnnnnnnnnnnnnnnnnnnnnnnnnnnnnnnnnnnnnnnnnnnnnnnnnnnnnnnnnnnnnnnnnnnnnnnnnnnnnnnnnnnnnnnnnnnnnnnnnnnnnnnnnnnnnnnnnnnnnnnnnnnnnnnnnnnnnnnnnnnnnnnnnnnnnnnnnnnnnnnnnnnnnnnnnnnnnnnnnnnnnnnnnnnnnnnnnnnnnnnnnnnnnnnnnnnnnnnnnnnnnnnnnnnnnnnnnnnnnnnnnnnnnnnnnnnnnnnnnnnnnnnnnnnnnnnnnnnnnnnnnnnnnnnnnnnnnnnnnnnnnnnnnnnnnnnnnnnnnnnnnnnnnnnnnnnnnnnnnnnnnnnnnnnnnnnnnnnnnnnnnnnnnnnnnnnnnnnnnnnnnnnnnnnnnnnnnnnnnnnnnnnnnnnnnnnnnnnnnnnnnnnnnnnnnnnnnnnnnnnnnnnnnnnnnnnnnnnnnnnnnnnnnnnnnnnnnnnnnnnnnnnnnnnnnnnnnnnnnnnnnnnnnnnnnnnnnnnnnnnnnnnnnnnnnnnnnnnnnnnnnnnnnnnnnnnnnnnnnnnnnnnnnnnnnnnnnnnnnnnnnnnnnnnnnnnnnnnnnnnnnnnnnnnnnnnnnnnnnnnnnnnnnnnnnnnnnnnnnnnnnnnnnnnnnnnnnnnnnnnnnnnnnnnnnnnnnnnnnnnnnnnnnnnnnnnnnnnnnnnnnnnnnnnnnnnnnnnnnnnnnnnnnnnnnnnnnnnnnnnnnnnnnnnnnnnnnnnnnnnnnnnnnnnnnnnnnnnnnnnnnnnnnnnnnnnnnnnnnnnnnnnnnnnnnnnnnnnnnnnnnnnnnnnnnnnnnnnnnnnnnnnnnnnnnnnnnnnnnnnnnnnnnnnnnnnnnnnnnnnnnnnnnnnnnnnnnnnnnnnnnnnnnnnnnnnnnnnnnnnnnnnnnnnnnnnnnnnnnnnnnnnnnnnnnnnnnnnnnnnnnnnnnnnnnnnnnnnnnnnnnnnnnnnnnnnnnnnnnnnnnnnnnnnnnnnnnnnnnnnnnnnnnnnnnnnnnnnnnnnnnnnnnnnnnnnnnnnnnnnnnnnnnnnnnnnnnnnnnnnnnnnnnnnnnnnnnnnnnnnnnnnnnnnnnnnnnnnnnnnnnnnnnnnnnnnnnnnnnnnnnnnnnnnnnnnnnnnnnnnnnnnnnnnnnnnnnnnnnnnnnnnnnnnnnnnnnnnnnnnnnnnnnnnnnnnnnnnnnnnnnnnnnnnnnnnnnnnnnnnnnnnnnnnnnnnnnnnnnnnnnnnnnnnnnnnnnnnnnnnnnnnnnnnnnnnnnnnnnnnnnnnnnnnnnnnnnnnnnnnnnnnnnnnnnnnnnnnnnnnnnnnnnnnnnnnnnnnnnnnnnnnnnnnnnnnnnnnnnnnnnnnnnnnnnnnnnnnnnnnnnnnnnnnnnnnnnnnnnnnnnnnnnnnnnnnnnnnnnnnnnnnnnnnnnnnnnnnnnnnnnnnnnnnnnnnnnnnnnnnnnnnnnnnnnnnnnnnnnnnnnnnnnnnnnnnnnnnnnnnnnnnnnnnnnnnnnnnnnnnnnnnnnnnnnnnnnnnnnnnnnnnnnnnnnnnnnnnnnnnnnnnnnnnnnnnnnnnnnnnnnnnnnnnnnnnnnnnnnnnnnnnnnnnnnnnnnnnnnnnnnnnnnnnnnnnnnnnnnnnnnnnnnnnnnnnnnnnnnnnnnnnnnnnnnnnnnnnnnnnnnnnnnnnnnnnnnnnnnnnnnnnnnnnnnnnnnnnnnnnnnnnnnnnnnnnnnnnnnnnnnnnnnnnnnnnnnnnnnnnnnnnnnnnnnnnnnnnnnnnnnnnnnnnnnnnnnnnnnnnnnnnnnnnnnnnnnnnnnnnnnnnnnnnnnnnnnnnnnnnnnnnnnnnnnnnnnnnnnnnnnnnnnnnnnnnnnnnnnnnnnnnnnnnnnnnnnnnnnnnnnnnnnnnnnnnnnnnnnnnnnnnnnnnnnnnnnnnnnnnnnnnnnnnnnnnnnnnnnnnnnnnnnnnnnnnnnnnnnnnnnnnnnnnnnnnnnnnnnnnnnnnnnnnnnnnnnnnnnnnnnnnnnnnnnnnnnnnnnnnnnnnnnnnnnnnnnnnnnnnnnnnnnnnnnnnnnnnnnnnnnnnnnnnnnnnnnnnnnnnnnnnnnnnnnnnnnnnnnnnnnnnnnnnnnnnnnnnnnnnnnnnnnnnnnnnnnnnnnnnnnnnnnnnnnnnnnnnnnnnnnnnnnnnnnnnnnnnnnnnnnnnnnnnnnnnnnnnnnnnnnnnnnnnnnnnnnnnnnnnnnnnnnnnnnnnnnnnnnnnnnnnnnnnnnnnnnnnnnnnnnnnnnnnnnnnnnnnnnnnnnnnnnnnnnnnnnnnnnnnnnnnnnnnnnnnnnnnnnnnnnnnnnnnnnnnnnnnnnnnnnnnnnnnnnnnnnnnnnnnnnnnnnnnnnnnnnnnnnnnnnnnnnnnnnnnnnnnnnnnnnnnnnnnnnnnnnnnnnnnnnnnnnnnnnnnnnnnnnnnnnnnnnnnnnnnnnnnnnnnnnnnnnnnnnnnnnnnnnnnnnnnnnnnnnnnnnnnnnnnnnnnnnnnnnnnnnnnnnnnnnnnnnnnnnnnnnnnnnnnnnnnnnnnnnnnnnnnnnnnnnnnnnnnnnnnnnnnnnnnnnnnnnnnnnnnnnnnnnnnnnnnnnnnnnnnnnnnnnnnnnnnnnnnnnnnnnnnnnnnnnnnnnnnnnnnnnnnnnnnnnnnnnnnnnnnnnnnnnnnnnnnnnnnnnnnnnnnnnnnnnnnnnnnnnnnnnnnnnnnnnnnnnnnnnnnnnnnnnnnnnnnnnnnnnnnnnnnnnnnnnnnnnnnnnnnnnnnnnnnnnnnnnnnnnnnnnnnnnnnnnnnnnnnnnnnnnnnnnnnnnnnnnnnnnnnnnnnnnnnnnnnnnnnnnnnnnnnnnnnnnnnnnnnnnnnnnnnnnnnnnnnnnnnnnnnnnnnnnnnnnnnnnnnnnnnnnnnnnnnnnnnnnnnnnnnnnnnnnnnnnnnnnnnnnnnnnnnnnnnnnnnnnnnnnnnnnnnnnnnnnnnnnnnnnnnnnnnnnnnnnnnnnnnnnnnnnnnnnnnnnnnnnnnnnnnnnnnnnnnnnnnnnnnnnnnnnnnnnnnnnnnnnnnnnnnnnnnnnnnnnnnnnnnnnnnnnnnnnnnnnnnnnnnnnnnnnnnnnnnnnnnnnnnnnnnnnnnnnnnnnnnnnnnnnnnnnnnnnnnnnnnnnnnnnnnnnnnnnnnnnnnnnnnnnnnnnnnnnnnnnnnnnnnnnnnnnnnnnnnnnnnnnnnnnnnnnnnnnnnnnnnnnnnnnnnnnnnnnnnnnnnnnnnnnnnnnnnnnnnnnnnnnnnnnnnnnnnnnnnnnnnnnnnnnnnnnnnnnnnnnnnnnnnnnnnnnnnnnnnnnnnnnnnnnnnnnnnnnnnnnnnnnnnnnnnnnnnnnnnnnnnnnnnnnnnnnnnnnnnnnnnnnnnnnnnnnnnnnnnnnnnnnnnnnnnnnnnnnnnnnnnnnnnnnnnnnnnnnnnnnnnnnnnnnnnnnnnnnnnnnnnnnnnnnnnnnnnnnnnnnnnnnnnnnnnnnnnnnnnnnnnnnnnnnnnnnnnnnnnnnnnnnnnnnnnnnnnnnnnnnnnnnnnnnnnnnnnnnnnnnnnnnnnnnnnnnnnnnnnnnnnnnnnnnnnnnnnnnnnnnnnnnnnnnnnnnnnnnnnnnnnnnnnnnnnnnnnnnnnnnnnnnnnnnnnnnnnnnnnnnnnnnnnnnnnnnnnnnnnnnnnnnnnnnnnnnnnnnnnnnnnnnnnnnnnnnnnnnnnnnnnnnnnnnnnnnnnnnnnnnnnnnnnnnnnnnnnnnnnnnnnnnnnnnnnnnnnnnnnnnnnnnnnnnnnnnnnnnnnnnnnnnnnnnnnnnnnnnnnnnnnnnnnnnnnnnnnnnnnnnnnnnnnnnnnnnnnnnnnnnnnnnnnnnnnnnnnnnnnnnnnnnnnnnnnnnnnnnnnnnnnnnnnnnnnnnnnnnnnnnnnnnnnnnnnnnnnnnnnnnnnnnnnnnnnnnnnnnnnnnnnnnnnnnnnnnnnnnnnnnnnnnnnnnnnnnnnnnnnnnnnnnnnnnnnnnnnnnnnnnnnnnnnnnnnnnnnnnnnnnnnnnnnnnnnnnnnnnnnnnnnnnnnnnnnnnnnnnnnnnnnnnnnnnnnnnnnnnnnnnnnnnnnnnnnnnnnnnnnnnnnnnnnnnnnnnnnnnnnnnnnnnnnnnnnnnnnnnnnnnnnnnnnnnnnnnnnnnnnnnnnnnnnnnnnnnnnnnnnnnnnnnnnnnnnnnnnnnnnnnnnnnnnnnnnnnnnnnnnnnnnnnnnnnnnnnnnnnnnnnnnnnnnnnnnnnnnnnnnnnnnnnnnnnnnnnnnnnnnnnnnnnnnnnnnnnnnnnnnnnnnnnnnnnnnnnnnnnnnnnnnnnnnnnnnnnnnnnnnnnnnnnnnnnnnnnnnnnnnnnnnnnnnnnnnnnnnnnnnnnnnnnnnnnnnnnnnnnnnnnnnnnnnnnnnnnnnnnnnnnnnnnnnnnnnnnnnnnnnnnnnnnnnnnnnnnnnnnnnnnnnnnnnnnnnnnnnnnnnnnnnnnnnnnnnnnnnnnnnnnnnnnnnnnnnnnnnnnnnnnnnnnnnnnnnnnnnnnnnnnnnnnnnnnnnnnnnnnnnnnnnnnnnnnnnnnnnnnnnnnnnnnnnnnnnnnnnnnnnnnnnnnnnnnnnnnnnnnnnnnnnnnnnnnnnnnnnnnnnnnnnnnnnnnnnnnnnnnnnnnnnnnnnnnnnnnnnnnnnnnnnnnnnnnnnnnnnnnnnnnnnnnnnnnnnnnnnnnnnnnnnnnnnnnnnnnnnnnnnnnnnnnnnnnnnnnnnnnnnnnnnnnnnnnnnnnnnnnnnnnnnnnnnnnnnnnnnnnnnnnnnnnnnnnnnnnnnnnnnnnnnnnnnnnnnnnnnnnnnnnnnnnnnnnnnnnnnnnnnnnnnnnnnnnnnnnnnnnnnnnnnnnnnnnnnnnnnnnnnnnnnnnnnnnnnnnnnnnnnnnnnnnnnnnnnnnnnnnnnnnnnnnnnnnnnnnnnnnnnnnnnnnnnnnnnnnnnnnnnnnnnnnnnnnnnnnnnnnnnnnnnnnnnnnnnnnnnnnnnnnnnnnnnnnnnnnnnnnnnnnnnnnnnnnnnnnnnnnnnnnnnnnnnnnnnnnnnnnnnnnnnnnnnnnnnnnnnnnnnnnnnnnnnnnnnnnnnnnnnnnnnnnnnnnnnnnnnnnnnnnnnnnnnnnnnnnnnnnnnnnnnnnnnnnnnnnnnnnnnnnnnnnnnnnnnnnnnnnnnnnnnnnnnnnnnnnnnnnnnnnnnnnnnnnnnnnnnnnnnnnnnnnnnnnnnnnnnnnnnnnnnnnnnnnnnnnnnnnnnnnnnnnnnnnnnnnnnnnnnnnnnnnnnnnnnnnnnnnnnnnnnnnnnnnnnnnnnnnnnnnnnnnnnnnnnnnnnnnnnnnnnnnnnnnnnnnnnnnnnnnnnnnnnnnnnnnnnnnnnnnnnnnnnnnnnnnnnnnnnnnnnnnnnnnnnnnnnnnnnnnnnnnnnnnnnnnnnnnnnnnnnnnnnnnnnnnnnnnnnnnnnnnnnnnnnnnnnnnnnnnnnnnnnnnnnnnnnnnnnnnnnnnnnnnnnnnnnnnnnnnnnnnnnnnnnnnnnnnnnnnnnnnnnnnnnnnnnnnnnnnnnnnnnnnnnnnnnnnnnnnnnnnnnnnnnnnnnnnnnnnnnnnnnnnnnnnnnnnnnnnnnnnnnnnnnnnnnnnnnnnnnnnnnnnnnnnnnnnnnnnnnnnnnnnnnnnnnnnnnnnnnnnnnnnnnnnnnnnnnnnnnnnnnnnnnnnnnnnnnnnnnnnnnnnnnnnnnnnnnnnnnnnnnnnnnnnnnnnnnnnnnnnnnnnnnnnnnnnnnnnnnnnnnnnnnnnnnnnnnnnnnnnnnnnnnnnnnnnnnnnnnnnnnnnnnnnnnnnnnnnnnnnnnnnnnnnnnnnnnnnnnnnnnnnnnnnnnnnnnnnnnnnnnnnnnnnnnnnnnnnnnnnnnnnnnnnnnnnnnnnnnnnnnnnnnnnnnnnnnnnnnnnnnnnnnnnnnnnnnnnnnnnnnnnnnnnnnnnnnnnnnnnnnnnnnnnnnnnnnnnnnnnnnnnnnnnnnnnnnnnnnnnnnnnnnnnnnnnnnnnnnnnnnnnnnnnnnnnnnnnnnnnnnnnnnnnnnnnnnnnnnnnnnnnnnnnnnnnnnnnnnnnnnnnnnnnnnnnnnnnnnnnnnnnnnnnnnnnnnnnnnnnnnnnnnnnnnnnnnnnnnnnnnnnnnnnnnnnnnnnnnnnnnnnnnnnnnnnnnnnnnnnnnnnnnnnnnnnnnnnnnnnnnnnnnnnnnnnnnnnnnnnnnnnnnnnnnnnnnnnnnnnnnnnnnnnnnnnnnnnnnnnnnnnnnnnnnnnnnnnnnnnnnnnnnnnnnnnnnnnnnnnnnnnnnnnnnnnnnnnnnnnnnnnnnnnnnnnnnnnnnnnnnnnnnnnnnnnnnnnnnnnnnnnnnnnnnnnnnnnnnnnnnnnnnnnnnnnnnnnnnnnnnnnnnnnnnnnnnnnnnnnnnnnnnnnnnnnnnnnnnnnnnnnnnnnnnnnnnnnnnnnnnnnnnnnnnnnnnnnnnnnnnnnnnnnnnnnnnnnnnnnnnnnnnnnnnnnnnnnnnnnnnnnnnnnnnnnnnnnnnnnnnnnnnnnnnnnnnnnnnnnnnnnnnnnnnnnnnnnnnnnnnnnnnnnnnnnnnnnnnnnnnnnnnnnnnnnnnnnnnnnnnnnnnnnnnnnnnnnnnnnnnnnnnnnnnnnnnnnnnnnnnnnnnnnnnnnnnnnnnnnnnnnnnnnnnnnnnnnnnnnnnnnnnnnnnnnnnnnnnnnnnnnnnnnnnnnnnnnnnnnnnnnnnnnnnnnnnnnnnnnnnnnnnnnnnnnnnnnnnnnnnnnnnnnnnnnnnnnnnnnnnnnnnnnnnnnnnnnnnnnnnnnnnnnnnnnnnnnnnnnnnnnnnnnnnnnnnnnnnnnnnnnnnnnnnnnnnnnnnnnnnnnnnnnnnnnnnnnnnnnnnnnnnnnnnnnnnnnnnnnnnnnnnnnnnnnnnnnnnnnnnnnnnnnnnnnnnnnnnnnnnnnnnnnnnnnnnnnnnnnnnnnnnnnnnnnnnnnnnnnnnnnnnnnnnnnnnnnnnnnnnnnnnnnnnnnnnnnnnnnnnnnnnnnnnnnnnnnnnnnnnnnnnnnnnnnnnnnnnnnnnnnnnnnnnnnnnnnnnnnnnnnnnnnnnnnnnnnnnnnnnnnnnnnnnnnnnnnnnnnnnnnnnnnnnnnnnnnnnnnnnnnnnnnnnnnnnnnnnnnnnnnnnnnnnnnnnnnnnnnnnnnnnnnnnnnnnnnnnnnnnnnnnnnnnnnnnnnnnnnnnnnnnnnnnnnnnnnnnnnnnnnnnnnnnnnnnnnnnnnnnnnnnnnnnnnnnnnnnnnnnnnnnnnnnnnnnnnnnnnnnnnnnnnnnnnnnnnnnnnnnnnnnnnnnnnnnnnnnnnnnnnnnnnnnnnnnnnnnnnnnnnnnnnnnnnnnnnnnnnnnnnnnnnnnnnnnnnnnnnnnnnnnnnnnnnnnnnnnnnnnnnnnnnnnnnnnnnnnnnnnnnnnnnnnnnnnnnnnnnnnnnnnnnnnnnnnnnnnnnnnnnnnnnnnnnnnnnnnnnnnnnnnnnnnnnnnnnnnnnnnnnnnnnnnnnnnnnnnnnnnnnnnnnnnnnnnnnnnnnnnnnnnnnnnnnnnnnnnnnnnnnnnnnnnnnnnnnnnnnnnnnnnnnnnnnnnnnnnnnnnnnnnnnnnnnnnnnnnnnnnnnnnnnnnnnnnnnnnnnnnnnnnnnnnnnnnnnnnnnnnnnnnnnnnnnnnnnnnnnnnnnnnnnnnnnnnnnnnnnnnnnnnnnnnnnnnnnnnnnnnnnnnnnnnnnnnnnnnnnnnnnnnnnnnnnnnnnnnnnnnnnnnnnnnnnnnnnnnnnnnnnnnnnnnnnnnnnnnnnnnnnnnnnnnnnnnnnnnnnnnnnnnnnnnnnnnnnnnnnnnnnnnnnnnnnnnnnnnnnnnnnnnnnnnnnnnnnnnnnnnnnnnnnnnnnnnnnnnnnnnnnnnnnnnnnnnnnnnnnnnnnnnnnnnnnnnnnnnnnnnnnnnnnnnnnnnnnnnnnnnnnnnnnnnnnnnnnnnnnnnnnnnnnnnnnnnnnnnnnnnnnnnnnnnnnnnnnnnnnnnnnnnnnnnnnnnnnnnnnnnnnnnnnnnnnnnnnnnnnnnnnnnnnnnnnnnnnnnnnnnnnnnnnnnnnnnnnnnnnnnnnnnnnnnnnnnnnnnnnnnnnnnnnnnnnnnnnnnnnnnnnnnnnnnnnnnnnnnnnnnnnnnnnnnnnnnnnnnnnnnnnnnnnnnnnnnnnnnnnnnnnnnnnnnnnnnnnnnnnnnnnnnnnnnnnnnnnnnnnnnnnnnnnnnnnnnnnnnnnnnnnnnnnnnnnnnnnnnnnnnnnnnnnnnnnnnnnnnnnnnnnnnnnnnnnnnnnnnnnnnnnnnnnnnnnnnnnnnnnnnnnnnnnnnnnnnnnnnnnnnnnnnnnnnnnnnnnnnnnnnnnnnnnnnnnnnnnnnnnnnnnnnnnnnnnnnnnnnnnnnnnnnnnnnnnnnnnnnnnnnnnnnnnnnnnnnnnnnnnnnnnnnnnnnnnnnnnnnnnnnnnnnnnnnnnnnnnnnnnnnnnnnnnnnnnnnnnnnnnnnnnnnnnnnnnnnnnnnnnnnnnnnnnnnnnnnnnnnnnnnnnnnnnnnnnnnnnnnnnnnnnnnnnnnnnnnnnnnnnnnnnnnnnnnnnnnnnnnnnnnnnnnnnnnnnnnnnnnnnnnnnnnnnnnnnnnnnnnnnnnnnnnnnnnnnnnnnnnnnnnnnnnnnnnnnnnnnnnnnnnnnnnnnnnnnnnnnnnnnnnnnnnnnnnnnnnnnnnnnnnnnnnnnnnnnnnnnnnnnnnnnnnnnnnnnnnnnnnnnnnnnnnnnnnnnnnnnnnnnnnnnnnnnnnnnnnnnnnnnnnnnnnnnnnnnnnnnnnnnnnnnnnnnnnnnnnnnnnnnnnnnnnnnnnnnnnnnnnnnnnnnnnnnnnnnnnnnnnnnnnnnnnnnnnnnnnnnnnnnnnnnnnnnnnnnnnnnnnnnnnnnnnnnnnnnnnnnnnnnnnnnnnnnnnnnnnnnnnnnnnntaacacagggggcttacaacctgcttgaagagaagtggatacctgttctttacggagatgggaagacggagcgtgttggaatctgcaaggcgctgaaagatgcccataaaatccggcagatagccgccagcaatcccatggacagggtggcgctcctgcgctttctgttggccgtgctcatgtggtgcaaagaggacgcgaagtcttccctcgcggcgctggacgagaagagcgccggcataccgaagaactggctggctaaactggaggaaaacagggccgcgttcaatctgctgggcgacggtaaaaggttctatcaggacgaatcgttgaagggcaaggattcgttgaagggcaacgattcgttgaaggacgacgattcgttgaaggacgacgattcgttgaagggcaacgattcgttgaagggcaacgattcgttgaaggatgacgattcgtcgaaggacaagaaatctcggcccatcagcgatctgctcgtcgagttccctggagcggattcggtgaatcacatgcgccacgttgtgcatgacgacccctacgggttctgccccgcgtgttgcgcgatgggaatcttgcggctctcggtctggtctccggccaacaagtattatcccgcatcagtcaacccgggctctgcggcctacgcatttattgaagggaagaacctgcttcaaactctgtgcgccaatctgccgcaaacccaaggcgcctctgccccgccgcaacctcctccgtggctgctcactaatccccctaccgcgcctgacgacgttgcccgcctgacgtggcgtccgcgcaaactgtggttgaagttcgcggaccatcggggcacatgcgcctactgcggaagcaacggagtgttggtcaaacgcctgtacaacaagtatggctggtccactcccgtcaccgacggccaacggttcggaaaggacgtcttggccgagttccagaaaatcaacaatgcttacgggtcaaaaaaaacagacgagttcaagctggccgacaaagtagtcagggtcgcgcagctcatccgcaaatgcagaatggaagcgcttggtgcggccgacacccccgccgccgctgcgccaaatcctgaacccgacgaacagaaaatcgcccgcgtctttcaccagcttttcactgcggacaatcagcgggcgatcgaggaactgactaagaaggcaaccgaacaggaatcgccgcatctgagcgggagtgacacgcaggtcaaaaagttctgggacactgatccccatctgttgaagaaaaagggtgagcctatatccctgcccggattggcggcggatgtggccgcacactcttctcggttctggcgcgacgcctttcgtcttcgcggtcaacgccaaggcaaagtatccgccatcggtcccgtcgtaaacaaattcacgtttcaagacgcgacaagcgtgtccgttccgaatgaggcggctaatcagcgcgtcgaacgctccgcaagcattcgcgacgggctgcgcggacttgtcaagtacaccacgcccaaccagaagacgggcaagtacgatcaccacgaaatcgacgccgcagttgtgctgttgacggccgacgctgaggcccgcgttcggaccgcgcttgaacagcccccagcaagggcgcaaaccgacgccgaagcggacaagaattttctgcgtgaaatcttcgagccggtcgtcgaacaaattgtcgcatccaccaccaagggctcgccattgcgccgccgcgcggcgaaagagcacgccaaagccctgctgaacaaaaagatcaaagagctggttgagaagccggatcatctgtcgaacgcaggtacgcctgcagccgtgcctggcaaaccgaaacgtggccgcaagaagggaggctcaaaatgagccagaccgctgaatacatcaagcggctttcagccttgcaggaaggcgagcgctcgcggctgcgccgtctggccggacggccgctcgacgcaacgctccagggtttcgacctcttcacgggtctctggtggccactgcgggcgaagagtccggcgaccccgcgccgggagccgtcatggctcgtcgccaagcttttcggcgcgttccgcgtcccacacatccggcccgattcaggcgcggggccttctttgcctgaagtcctgggccgctgcgaaccgcgcgacgaggatgaccgcaagcgcttccgaactcgattcgacgctctgctttgctcgtccctgtcgtctgtggagccgcatctgcgctgggcgctgggggaagtcgccaaggctgtcgccgggcacgtgccgcaggcgcgggatgtgacgggcatcgactgggtgcaactccttgacgatctctccatctgggaccggggcgaggagcaccgccgcggacgcgatgttcgcgacatctgggccgagacgtatctcaacgctacgaaattactcgaaaggagggcataaacatgctcatcgaaatccacatgatccagaatcacagcccggcgaacctgaaccgggacgatcttggcgcgcccaagacctgcatcttcggcggcgtcacccgggcgcgcatctccagccagtgtctcaaacgcagcatccggcgcagcccggagttcgcggttgctttggagaaggacggcggtgtgcgtacacggcggctgatcgaactgatcgcaaaggcggcggcgggcgaaggcaatccacaggaagagcgacatcgcgaggccatccggaaggaattcaagaaggggggggtcggcctgaaggatgaggacactttcgatatactcttctttctgcctcaatccgccgtcaacgaaatgggccaggctgtgcggacgggaaacggcgacctgggcaagaacttcgccgagatcatcggcgagttcgtcaagacacccgacatcgcactttgtggccgcatgacggagttcgatgccaaaggcccgtttaaggatctgaagggtaagttcaccgtcgaagccgcgttgtccgcggcacacgccatctcgactcacgcggtcgtgaacgaggtggactacttcaccgctgccgacgacgtgcccggccaggacgccggcgcggcccacgtcaacgaggccatgttcaactcggcctgcttctacaaacacttcgtcattgacttcgagcagttgaagaagaacctggcggacgatgccgacctcgcccgcaagacaataaggtgcttccttgaagcggccgccaaggccaacccctccggcaaacagcacgccttcgcggcatttaatccgcccgacgcagttctggtcgaggttaaaaccaagtcagctacgcccgtcagctacgccaacgccttcgccgatccggtgccggaaaagtccgaacgcggtttgatcggcgaaagcatcgccaggctcggccagtacgcccaagatctcgttgcaggttacggcatcgaggccgatcgtttctggttctcgccgaatctgcgccatcgcctgacctggatcgacaaaagccagaaggaacacgagcaagaacaatccgtggtcggttccgacgagttcggcgagttcgatcagttcatccataaggtcatggacaagctcggggcaaccggggcgcctgcggaggcggcgaaatgaccgacgccaacacaatcttcctccgcctggaaggccccctccaggcctggggcgacacgtcgaagttcgtcatccggcggaccatggatgccccgaccaagtccggggtgctgggcctgctctgctgcgccatgggcctgtcgcgtgagaaggcgcgggaacgcctgccggagttgaacgggcttgcgatgggtgtgcgcatcgaccggcacggcacacggtggtgggattatcagacggtaggagcgggaatcggcatgacaaccgctgggaacgaagtgaagaccggcgcccagggcacgctcatcacgcgccgggagtacctggccgacgcgagctttctcgtggcgctccagggtgatgcgaagttgatccatgaccttgccgcggcgattgcgtcgccgaagtggccggttttcctcggccgcaagtcctgcccgccgagcgtgccgatcctcgtgacgcgaaagcgcgaggacggcacctgcgagccgcatatcgaaacgggcaggtccctgcttgatgccctcaagtgtgttccctggcaaccgcgcctgcccaactttgagcctgacaagaagcctgataagctcgcctgtatcctcgaatggcgggcgacggacaccgagccggaagcccccaatgatgccgaagtctggtacgacgcgcccgtcgcgttcgatcctccggtacatcatccgcgtttagtcacgcgcaccgaactcaccagcggagcgaacggtgtgtccaccgacggtgccacgcaagagcgtgtgccgcgtcccccccgtccgcacgcgaactacaacaacgctgaatggaaaagcgagaccctgattgccgaccccgccgatccgtctcgcaaggttcccaaaggcatgaggccgcgccgccttcagcgtgaccacggcctctgtgtcttctgtaaagccccggcaaacaccgtccagcacatcacctaccgaagggccggcggagacgaaaccctggaggacctgcgttcgctttgccgcctgtgccatgacgccgtcaccatgctcgaatacggcctcggcatggggctggaccgcatcaatcctgaggagccccgctggcgcaagccgatcattcaaaagcgggccgagatcgttgaatttcgctcgctggagacccgccgtcggcgtcttgccgccgaggaggtggaatagccatgtaccggtcctgtctattgatcgacgtaggcggcaaccccgaccggcctcggcccgggcggtcgtggctgaggaaccgctatcatgtccaccagcgcctttgtatggcctttccgtccgcgtcccggaaggccgaagatagggacttcctccaaccgttcaaaccggatgagtttggtaaaggccaagtccatgtgaagcgtgccgtgggctcgggatttcttttcctcatcgaacctctccgcggcggcagggcggtaatcatcgtgcagtctgccatagagcccgactggtgctatgcctttcacaatgcggattatctgctggcagcgccccctgaggtgaaaccattcgacccacgcttctcggaaggccggtgccttcggttccgcctcgcggcaaatccgaccagacgtctgtgcaagcattcaccggatgcaaaagaagaatctatcggaaagcgcgttcccgttccgaccaaccggcttgtcgactggcttgcccgccgggccgaatcggcaggattccatatcgaggaagacgccacgacccttcagccggggttcgtctatatgaacaaaaacggcaaggggcagcgtctgcgttcggttcttttcgaaggcctcctccaggtcacggacccggatgcctttcggcagacccttatccgcggcatcggttccggcaaatccttcgggttcggcctgctttcgatcgcgccggccaatactgcgggctcggacgaggcgacatgagagtccgggacctgcagattctgcccaagttcagggacggctggagctatctctacgtcgagcattgccgcgtcgaccaggaagtccgggccattgccatccacgatgcatccggcaaggtgcctgtcccctgtgcgaatctggcgctgctcatgctggggccgggcgtatcgattacgcatgccgccatttccgtgttggcggaccatggttgcctggtcatctggtgcggcgaagagggagtccggttctatgcggcgggcatgggcgagacgcggagcgcggcgaacttcctgcatcaggcgcgggcttgggcggatgcggatcttcgtttgaaggtggtgcaccgtttgtaccagttgcggtttgccgagacgttcgatccgaagctgaccctgcgccagatccgcggaatggaaggcgtccgtgtccgggatgcctatgcccgggccgccagggaaaccggcgtgccttgggcgggccgcagctaccggcgtgacaagtgggcccatgcggacccggtgaacagggccttgtcggcggccaattcgtgtctttacggcatttgccatgcggctgttacttcggcgggattctcgcccgcgctcggcttcatccataccggcaaaatgctgtccttcgtttatgatgtcgccgatctttacaaggcggaaatttctatcccagcggcatttcgcgcagcagcgcaagagcaggccaggctggaacgacatgtgcgcatctcgtgccgtgacctgtttgtgtcaacaaggcttctggagaggatcattcctgacatccaaaaagcgctgatgttgccaaagaaaggcgcgacaagtgatgacccattcggccaggacgccgccgccccaggcgctttgtgggaccccttgacgggagaagtagagggcgggtgcacctatccgttggaaactgatgaaacggaggccaacgatggtggttctgattcttgagcgtgtgccgcctgggttacggggtgaattgacacggtggtttctggaaccgaagacaggagtttttgtggggagggtttcagccatggtgcgcgataaactctgggaaaaagcctgcgggaatgccaggaggggcggttgtgtgatgatgtattcgagcgacaatgagcagggttttcggattcggagttggggaaaatcggcgcggtcggtcgaagacttcgaggggctatttctcgtcagggtgccgtaaattcaggtttattcagtagcgtccccacgcacgtgggggtgaaccggcgggcgctttgagtcgcattaaaccacccgcagcgtccccacgcacgtgggggtgaacccggcgcgggcgaatgggcgtggacaagcccgtgagcgtccccacgcacgtggg

SEQ ID NO: 1121 - DNA, 103430 bp, Artificial Sequence
  Synthetic Oligonucleotide
  misc_feature (1)..(96614): n is a, c, g, or t
nnnnnnnnnnnnnnnnnnnnnnnnnnnnnnnnnnnnnnnnnnnnnnnnnnnnnnnnnnnnnnnnnnnnnnnnnnnnnnnnnnnnnnnnnnnnnnnnnnnnnnnnnnnnnnnnnnnnnnnnnnnnnnnnnnnnnnnnnnnnnnnnnnnnnnnnnnnnnnnnnnnnnnnnnnnnnnnnnnnnnnnnnnnnnnnnnnnnnnnnnnnnnnnnnnnnnnnnnnnnnnnnnnnnnnnnnnnnnnnnnnnnnnnnnnnnnnnnnnnnnnnnnnnnnnnnnnnnnnnnnnnnnnnnnnnnnnnnnnnnnnnnnnnnnnnnnnnnnnnnnnnnnnnnnnnnnnnnnnnnnnnnnnnnnnnnnnnnnnnnnnnnnnnnnnnnnnnnnnnnnnnnnnnnnnnnnnnnnnnnnnnnnnnnnnnnnnnnnnnnnnnnnnnnnnnnnnnnnnnnnnnnnnnnnnnnnnnnnnnnnnnnnnnnnnnnnnnnnnnnnnnnnnnnnnnnnnnnnnnnnnnnnnnnnnnnnnnnnnnnnnnnnnnnnnnnnnnnnnnnnnnnnnnnnnnnnnnnnnnnnnnnnnnnnnnnnnnnnnnnnnnnnnnnnnnnnnnnnnnnnnnnnnnnnnnnnnnnnnnnnnnnnnnnnnnnnnnnnnnnnnnnnnnnnnnnnnnnnnnnnnnnnnnnnnnnnnnnnnnnnnnnnnnnnnnnnnnnnnnnnnnnnnnnnnnnnnnnnnnnnnnnnnnnnnnnnnnnnnnnnnnnnnnnnnnnnnnnnnnnnnnnnnnnnnnnnnnnnnnnnnnnnnnnnnnnnnnnnnnnnnnnnnnnnnnnnnnnnnnnnnnnnnnnnnnnnnnnnnnnnnnnnnnnnnnnnnnnnnnnnnnnnnnnnnnnnnnnnnnnnnnnnnnnnnnnnnnnnnnnnnnnnnnnnnnnnnnnnnnnnnnnnnnnnnnnnnnnnnnnnnnnnnnnnnnnnnnnnnnnnnnnnnnnnnnnnnnnnnnnnnnnnnnnnnnnnnnnnnnnnnnnnnnnnnnnnnnnnnnnnnnnnnnnnnnnnnnnnnnnnnnnnnnnnnnnnnnnnnnnnnnnnnnnnnnnnnnnnnnnnnnnnnnnnnnnnnnnnnnnnnnnnnnnnnnnnnnnnnnnnnnnnnnnnnnnnnnnnnnnnnnnnnnnnnnnnnnnnnnnnnnnnnnnnnnnnnnnnnnnnnnnnnnnnnnnnnnnnnnnnnnnnnnnnnnnnnnnnnnnnnnnnnnnnnnnnnnnnnnnnnnnnnnnnnnnnnnnnnnnnnnnnnnnnnnnnnnnnnnnnnnnnnnnnnnnnnnnnnnnnnnnnnnnnnnnnnnnnnnnnnnnnnnnnnnnnnnnnnnnnnnnnnnnnnnnnnnnnnnnnnnnnnnnnnnnnnnnnnnnnnnnnnnnnnnnnnnnnnnnnnnnnnnnnnnnnnnnnnnnnnnnnnnnnnnnnnnnnnnnnnnnnnnnnnnnnnnnnnnnnnnnnnnnnnnnnnnnnnnnnnnnnnnnnnnnnnnnnnnnnnnnnnnnnnnnnnnnnnnnnnnnnnnnnnnnnnnnnnnnnnnnnnnnnnnnnnnnnnnnnnnnnnnnnnnnnnnnnnnnnnnnnnnnnnnnnnnnnnnnnnnnnnnnnnnnnnnnnnnnnnnnnnnnnnnnnnnnnnnnnnnnnnnnnnnnnnnnnnnnnnnnnnnnnnnnnnnnnnnnnnnnnnnnnnnnnnnnnnnnnnnnnnnnnnnnnnnnnnnnnnnnnnnnnnnnnnnnnnnnnnnnnnnnnnnnnnnnnnnnnnnnnnnnnnnnnnnnnnnnnnnnnnnnnnnnnnnnnnnnnnnnnnnnnnnnnnnnnnnnnnnnnnnnnnnnnnnnnnnnnnnnnnnnnnnnnnnnnnnnnnnnnnnnnnnnnnnnnnnnnnnnnnnnnnnnnnnnnnnnnnnnnnnnnnnnnnnnnnnnnnnnnnnnnnnnnnnnnnnnnnnnnnnnnnnnnnnnnnnnnnnnnnnnnnnnnnnnnnnnnnnnnnnnnnnnnnnnnnnnnnnnnnnnnnnnnnnnnnnnnnnnnnnnnnnnnnnnnnnnnnnnnnnnnnnnnnnnnnnnnnnnnnnnnnnnnnnnnnnnnnnnnnnnnnnnnnnnnnnnnnnnnnnnnnnnnnnnnnnnnnnnnnnnnnnnnnnnnnnnnnnnnnnnnnnnnnnnnnnnnnnnnnnnnnnnnnnnnnnnnnnnnnnnnnnnnnnnnnnnnnnnnnnnnnnnnnnnnnnnnnnnnnnnnnnnnnnnnnnnnnnnnnnnnnnnnnnnnnnnnnnnnnnnnnnnnnnnnnnnnnnnnnnnnnnnnnnnnnnnnnnnnnnnnnnnnnnnnnnnnnnnnnnnnnnnnnnnnnnnnnnnnnnnnnnnnnnnnnnnnnnnnnnnnnnnnnnnnnnnnnnnnnnnnnnnnnnnnnnnnnnnnnnnnnnnnnnnnnnnnnnnnnnnnnnnnnnnnnnnnnnnnnnnnnnnnnnnnnnnnnnnnnnnnnnnnnnnnnnnnnnnnnnnnnnnnnnnnnnnnnnnnnnnnnnnnnnnnnnnnnnnnnnnnnnnnnnnnnnnnnnnnnnnnnnnnnnnnnnnnnnnnnnnnnnnnnnnnnnnnnnnnnnnnnnnnnnnnnnnnnnnnnnnnnnnnnnnnnnnnnnnnnnnnnnnnnnnnnnnnnnnnnnnnnnnnnnnnnnnnnnnnnnnnnnnnnnnnnnnnnnnnnnnnnnnnnnnnnnnnnnnnnnnnnnnnnnnnnnnnnnnnnnnnnnnnnnnnnnnnnnnnnnnnnnnnnnnnnnnnnnnnnnnnnnnnnnnnnnnnnnnnnnnnnnnnnnnnnnnnnnnnnnnnnnnnnnnnnnnnnnnnnnnnnnnnnnnnnnnnnnnnnnnnnnnnnnnnnnnnnnnnnnnnnnnnnnnnnnnnnnnnnnnnnnnnnnnnnnnnnnnnnnnnnnnnnnnnnnnnnnnnnnnnnnnnnnnnnnnnnnnnnnnnnnnnnnnnnnnnnnnnnnnnnnnnnnnnnnnnnnnnnnnnnnnnnnnnnnnnnnnnnnnnnnnnnnnnnnnnnnnnnnnnnnnnnnnnnnnnnnnnnnnnnnnnnnnnnnnnnnnnnnnnnnnnnnnnnnnnnnnnnnnnnnnnnnnnnnnnnnnnnnnnnnnnnnnnnnnnnnnnnnnnnnnnnnnnnnnnnnnnnnnnnnnnnnnnnnnnnnnnnnnnnnnnnnnnnnnnnnnnnnnnnnnnnnnnnnnnnnnnnnnnnnnnnnnnnnnnnnnnnnnnnnnnnnnnnnnnnnnnnnnnnnnnnnnnnnnnnnnnnnnnnnnnnnnnnnnnnnnnnnnnnnnnnnnnnnnnnnnnnnnnnnnnnnnnnnnnnnnnnnnnnnnnnnnnnnnnnnnnnnnnnnnnnnnnnnnnnnnnnnnnnnnnnnnnnnnnnnnnnnnnnnnnnnnnnnnnnnnnnnnnnnnnnnnnnnnnnnnnnnnnnnnnnnnnnnnnnnnnnnnnnnnnnnnnnnnnnnnnnnnnnnnnnnnnnnnnnnnnnnnnnnnnnnnnnnnnnnnnnnnnnnnnnnnnnnnnnnnnnnnnnnnnnnnnnnnnnnnnnnnnnnnnnnnnnnnnnnnnnnnnnnnnnnnnnnnnnnnnnnnnnnnnnnnnnnnnnnnnnnnnnnnnnnnnnnnnnnnnnnnnnnnnnnnnnnnnnnnnnnnnnnnnnnnnnnnnnnnnnnnnnnnnnnnnnnnnnnnnnnnnnnnnnnnnnnnnnnnnnnnnnnnnnnnnnnnnnnnnnnnnnnnnnnnnnnnnnnnnnnnnnnnnnnnnnnnnnnnnnnnnnnnnnnnnnnnnnnnnnnnnnnnnnnnnnnnnnnnnnnnnnnnnnnnnnnnnnnnnnnnnnnnnnnnnnnnnnnnnnnnnnnnnnnnnnnnnnnnnnnnnnnnnnnnnnnnnnnnnnnnnnnnnnnnnnnnnnnnnnnnnnnnnnnnnnnnnnnnnnnnnnnnnnnnnnnnnnnnnnnnnnnnnnnnnnnnnnnnnnnnnnnnnnnnnnnnnnnnnnnnnnnnnnnnnnnnnnnnnnnnnnnnnnnnnnnnnnnnnnnnnnnnnnnnnnnnnnnnnnnnnnnnnnnnnnnnnnnnnnnnnnnnnnnnnnnnnnnnnnnnnnnnnnnnnnnnnnnnnnnnnnnnnnnnnnnnnnnnnnnnnnnnnnnnnnnnnnnnnnnnnnnnnnnnnnnnnnnnnnnnnnnnnnnnnnnnnnnnnnnnnnnnnnnnnnnnnnnnnnnnnnnnnnnnnnnnnnnnnnnnnnnnnnnnnnnnnnnnnnnnnnnnnnnnnnnnnnnnnnnnnnnnnnnnnnnnnnnnnnnnnnnnnnnnnnnnnnnnnnnnnnnnnnnnnnnnnnnnnnnnnnnnnnnnnnnnnnnnnnnnnnnnnnnnnnnnnnnnnnnnnnnnnnnnnnnnnnnnnnnnnnnnnnnnnnnnnnnnnnnnnnnnnnnnnnnnnnnnnnnnnnnnnnnnnnnnnnnnnnnnnnnnnnnnnnnnnnnnnnnnnnnnnnnnnnnnnnnnnnnnnnnnnnnnnnnnnnnnnnnnnnnnnnnnnnnnnnnnnnnnnnnnnnnnnnnnnnnnnnnnnnnnnnnnnnnnnnnnnnnnnnnnnnnnnnnnnnnnnnnnnnnnnnnnnnnnnnnnnnnnnnnnnnnnnnnnnnnnnnnnnnnnnnnnnnnnnnnnnnnnnnnnnnnnnnnnnnnnnnnnnnnnnnnnnnnnnnnnnnnnnnnnnnnnnnnnnnnnnnnnnnnnnnnnnnnnnnnnnnnnnnnnnnnnnnnnnnnnnnnnnnnnnnnnnnnnnnnnnnnnnnnnnnnnnnnnnnnnnnnnnnnnnnnnnnnnnnnnnnnnnnnnnnnnnnnnnnnnnnnnnnnnnnnnnnnnnnnnnnnnnnnnnnnnnnnnnnnnnnnnnnnnnnnnnnnnnnnnnnnnnnnnnnnnnnnnnnnnnnnnnnnnnnnnnnnnnnnnnnnnnnnnnnnnnnnnnnnnnnnnnnnnnnnnnnnnnnnnnnnnnnnnnnnnnnnnnnnnnnnnnnnnnnnnnnnnnnnnnnnnnnnnnnnnnnnnnnnnnnnnnnnnnnnnnnnnnnnnnnnnnnnnnnnnnnnnnnnnnnnnnnnnnnnnnnnnnnnnnnnnnnnnnnnnnnnnnnnnnnnnnnnnnnnnnnnnnnnnnnnnnnnnnnnnnnnnnnnnnnnnnnnnnnnnnnnnnnnnnnnnnnnnnnnnnnnnnnnnnnnnnnnnnnnnnnnnnnnnnnnnnnnnnnnnnnnnnnnnnnnnnnnnnnnnnnnnnnnnnnnnnnnnnnnnnnnnnnnnnnnnnnnnnnnnnnnnnnnnnnnnnnnnnnnnnnnnnnnnnnnnnnnnnnnnnnnnnnnnnnnnnnnnnnnnnnnnnnnnnnnnnnnnnnnnnnnnnnnnnnnnnnnnnnnnnnnnnnnnnnnnnnnnnnnnnnnnnnnnnnnnnnnnnnnnnnnnnnnnnnnnnnnnnnnnnnnnnnnnnnnnnnnnnnnnnnnnnnnnnnnnnnnnnnnnnnnnnnnnnnnnnnnnnnnnnnnnnnnnnnnnnnnnnnnnnnnnnnnnnnnnnnnnnnnnnnnnnnnnnnnnnnnnnnnnnnnnnnnnnnnnnnnnnnnnnnnnnnnnnnnnnnnnnnnnnnnnnnnnnnnnnnnnnnnnnnnnnnnnnnnnnnnnnnnnnnnnnnnnnnnnnnnnnnnnnnnnnnnnnnnnnnnnnnnnnnnnnnnnnnnnnnnnnnnnnnnnnnnnnnnnnnnnnnnnnnnnnnnnnnnnnnnnnnnnnnnnnnnnnnnnnnnnnnnnnnnnnnnnnnnnnnnnnnnnnnnnnnnnnnnnnnnnnnnnnnnnnnnnnnnnnnnnnnnnnnnnnnnnnnnnnnnnnnnnnnnnnnnnnnnnnnnnnnnnnnnnnnnnnnnnnnnnnnnnnnnnnnnnnnnnnnnnnnnnnnnnnnnnnnnnnnnnnnnnnnnnnnnnnnnnnnnnnnnnnnnnnnnnnnnnnnnnnnnnnnnnnnnnnnnnnnnnnnnnnnnnnnnnnnnnnnnnnnnnnnnnnnnnnnnnnnnnnnnnnnnnnnnnnnnnnnnnnnnnnnnnnnnnnnnnnnnnnnnnnnnnnnnnnnnnnnnnnnnnnnnnnnnnnnnnnnnnnnnnnnnnnnnnnnnnnnnnnnnnnnnnnnnnnnnnnnnnnnnnnnnnnnnnnnnnnnnnnnnnnnnnnnnnnnnnnnnnnnnnnnnnnnnnnnnnnnnnnnnnnnnnnnnnnnnnnnnnnnnnnnnnnnnnnnnnnnnnnnnnnnnnnnnnnnnnnnnnnnnnnnnnnnnnnnnnnnnnnnnnnnnnnnnnnnnnnnnnnnnnnnnnnnnnnnnnnnnnnnnnnnnnnnnnnnnnnnnnnnnnnnnnnnnnnnnnnnnnnnnnnnnnnnnnnnnnnnnnnnnnnnnnnnnnnnnnnnnnnnnnnnnnnnnnnnnnnnnnnnnnnnnnnnnnnnnnnnnnnnnnnnnnnnnnnnnnnnnnnnnnnnnnnnnnnnnnnnnnnnnnnnnnnnnnnnnnnnnnnnnnnnnnnnnnnnnnnnnnnnnnnnnnnnnnnnnnnnnnnnnnnnnnnnnnnnnnnnnnnnnnnnnnnnnnnnnnnnnnnnnnnnnnnnnnnnnnnnnnnnnnnnnnnnnnnnnnnnnnnnnnnnnnnnnnnnnnnnnnnnnnnnnnnnnnnnnnnnnnnnnnnnnnnnnnnnnnnnnnnnnnnnnnnnnnnnnnnnnnnnnnnnnnnnnnnnnnnnnnnnnnnnnnnnnnnnnnnnnnnnnnnnnnnnnnnnnnnnnnnnnnnnnnnnnnnnnnnnnnnnnnnnnnnnnnnnnnnnnnnnnnnnnnnnnnnnnnnnnnnnnnnnnnnnnnnnnnnnnnnnnnnnnnnnnnnnnnnnnnnnnnnnnnnnnnnnnnnnnnnnnnnnnnnnnnnnnnnnnnnnnnnnnnnnnnnnnnnnnnnnnnnnnnnnnnnnnnnnnnnnnnnnnnnnnnnnnnnnnnnnnnnnnnnnnnnnnnnnnnnnnnnnnnnnnnnnnnnnnnnnnnnnnnnnnnnnnnnnnnnnnnnnnnnnnnnnnnnnnnnnnnnnnnnnnnnnnnnnnnnnnnnnnnnnnnnnnnnnnnnnnnnnnnnnnnnnnnnnnnnnnnnnnnnnnnnnnnnnnnnnnnnnnnnnnnnnnnnnnnnnnnnnnnnnnnnnnnnnnnnnnnnnnnnnnnnnnnnnnnnnnnnnnnnnnnnnnnnnnnnnnnnnnnnnnnnnnnnnnnnnnnnnnnnnnnnnnnnnnnnnnnnnnnnnnnnnnnnnnnnnnnnnnnnnnnnnnnnnnnnnnnnnnnnnnnnnnnnnnnnnnnnnnnnnnnnnnnnnnnnnnnnnnnnnnnnnnnnnnnnnnnnnnnnnnnnnnnnnnnnnnnnnnnnnnnnnnnnnnnnnnnnnnnnnnnnnnnnnnnnnnnnnnnnnnnnnnnnnnnnnnnnnnnnnnnnnnnnnnnnnnnnnnnnnnnnnnnnnnnnnnnnnnnnnnnnnnnnnnnnnnnnnnnnnnnnnnnnnnnnnnnnnnnnnnnnnnnnnnnnnnnnnnnnnnnnnnnnnnnnnnnnnnnnnnnnnnnnnnnnnnnnnnnnnnnnnnnnnnnnnnnnnnnnnnnnnnnnnnnnnnnnnnnnnnnnnnnnnnnnnnnnnnnnnnnnnnnnnnnnnnnnnnnnnnnnnnnnnnnnnnnnnnnnnnnnnnnnnnnnnnnnnnnnnnnnnnnnnnnnnnnnnnnnnnnnnnnnnnnnnnnnnnnnnnnnnnnnnnnnnnnnnnnnnnnnnnnnnnnnnnnnnnnnnnnnnnnnnnnnnnnnnnnnnnnnnnnnnnnnnnnnnnnnnnnnnnnnnnnnnnnnnnnnnnnnnnnnnnnnnnnnnnnnnnnnnnnnnnnnnnnnnnnnnnnnnnnnnnnnnnnnnnnnnnnnnnnnnnnnnnnnnnnnnnnnnnnnnnnnnnnnnnnnnnnnnnnnnnnnnnnnnnnnnnnnnnnnnnnnnnnnnnnnnnnnnnnnnnnnnnnnnnnnnnnnnnnnnnnnnnnnnnnnnnnnnnnnnnnnnnnnnnnnnnnnnnnnnnnnnnnnnnnnnnnnnnnnnnnnnnnnnnnnnnnnnnnnnnnnnnnnnnnnnnnnnnnnnnnnnnnnnnnnnnnnnnnnnnnnnnnnnnnnnnnnnnnnnnnnnnnnnnnnnnnnnnnnnnnnnnnnnnnnnnnnnnnnnnnnnnnnnnnnnnnnnnnnnnnnnnnnnnnnnnnnnnnnnnnnnnnnnnnnnnnnnnnnnnnnnnnnnnnnnnnnnnnnnnnnnnnnnnnnnnnnnnnnnnnnnnnnnnnnnnnnnnnnnnnnnnnnnnnnnnnnnnnnnnnnnnnnnnnnnnnnnnnnnnnnnnnnnnnnnnnnnnnnnnnnnnnnnnnnnnnnnnnnnnnnnnnnnnnnnnnnnnnnnnnnnnnnnnnnnnnnnnnnnnnnnnnnnnnnnnnnnnnnnnnnnnnnnnnnnnnnnnnnnnnnnnnnnnnnnnnnnnnnnnnnnnnnnnnnnnnnnnnnnnnnnnnnnnnnnnnnnnnnnnnnnnnnnnnnnnnnnnnnnnnnnnnnnnnnnnnnnnnnnnnnnnnnnnnnnnnnnnnnnnnnnnnnnnnnnnnnnnnnnnnnnnnnnnnnnnnnnnnnnnnnnnnnnnnnnnnnnnnnnnnnnnnnnnnnnnnnnnnnnnnnnnnnnnnnnnnnnnnnnnnnnnnnnnnnnnnnnnnnnnnnnnnnnnnnnnnnnnnnnnnnnnnnnnnnnnnnnnnnnnnnnnnnnnnnnnnnnnnnnnnnnnnnnnnnnnnnnnnnnnnnnnnnnnnnnnnnnnnnnnnnnnnnnnnnnnnnnnnnnnnnnnnnnnnnnnnnnnnnnnnnnnnnnnnnnnnnnnnnnnnnnnnnnnnnnnnnnnnnnnnnnnnnnnnnnnnnnnnnnnnnnnnnnnnnnnnnnnnnnnnnnnnnnnnnnnnnnnnnnnnnnnnnnnnnnnnnnnnnnnnnnnnnnnnnnnnnnnnnnnnnnnnnnnnnnnnnnnnnnnnnnnnnnnnnnnnnnnnnnnnnnnnnnnnnnnnnnnnnnnnnnnnnnnnnnnnnnnnnnnnnnnnnnnnnnnnnnnnnnnnnnnnnnnnnnnnnnnnnnnnnnnnnnnnnnnnnnnnnnnnnnnnnnnnnnnnnnnnnnnnnnnnnnnnnnnnnnnnnnnnnnnnnnnnnnnnnnnnnnnnnnnnnnnnnnnnnnnnnnnnnnnnnnnnnnnnnnnnnnnnnnnnnnnnnnnnnnnnnnnnnnnnnnnnnnnnnnnnnnnnnnnnnnnnnnnnnnnnnnnnnnnnnnnnnnnnnnnnnnnnnnnnnnnnnnnnnnnnnnnnnnnnnnnnnnnnnnnnnnnnnnnnnnnnnnnnnnnnnnnnnnnnnnnnnnnnnnnnnnnnnnnnnnnnnnnnnnnnnnnnnnnnnnnnnnnnnnnnnnnnnnnnnnnnnnnnnnnnnnnnnnnnnnnnnnnnnnnnnnnnnnnnnnnnnnnnnnnnnnnnnnnnnnnnnnnnnnnnnnnnnnnnnnnnnnnnnnnnnnnnnnnnnnnnnnnnnnnnnnnnnnnnnnnnnnnnnnnnnnnnnnnnnnnnnnnnnnnnnnnnnnnnnnnnnnnnnnnnnnnnnnnnnnnnnnnnnnnnnnnnnnnnnnnnnnnnnnnnnnnnnnnnnnnnnnnnnnnnnnnnnnnnnnnnnnnnnnnnnnnnnnnnnnnnnnnnnnnnnnnnnnnnnnnnnnnnnnnnnnnnnnnnnnnnnnnnnnnnnnnnnnnnnnnnnnnnnnnnnnnnnnnnnnnnnnnnnnnnnnnnnnnnnnnnnnnnnnnnnnnnnnnnnnnnnnnnnnnnnnnnnnnnnnnnnnnnnnnnnnnnnnnnnnnnnnnnnnnnnnnnnnnnnnnnnnnnnnnnnnnnnnnnnnnnnnnnnnnnnnnnnnnnnnnnnnnnnnnnnnnnnnnnnnnnnnnnnnnnnnnnnnnnnnnnnnnnnnnnnnnnnnnnnnnnnnnnnnnnnnnnnnnnnnnnnnnnnnnnnnnnnnnnnnnnnnnnnnnnnnnnnnnnnnnnnnnnnnnnnnnnnnnnnnnnnnnnnnnnnnnnnnnnnnnnnnnnnnnnnnnnnnnnnnnnnnnnnnnnnnnnnnnnnnnnnnnnnnnnnnnnnnnnnnnnnnnnnnnnnnnnnnnnnnnnnnnnnnnnnnnnnnnnnnnnnnnnnnnnnnnnnnnnnnnnnnnnnnnnnnnnnnnnnnnnnnnnnnnnnnnnnnnnnnnnnnnnnnnnnnnnnnnnnnnnnnnnnnnnnnnnnnnnnnnnnnnnnnnnnnnnnnnnnnnnnnnnnnnnnnnnnnnnnnnnnnnnnnnnnnnnnnnnnnnnnnnnnnnnnnnnnnnnnnnnnnnnnnnnnnnnnnnnnnnnnnnnnnnnnnnnnnnnnnnnnnnnnnnnnnnnnnnnnnnnnnnnnnnnnnnnnnnnnnnnnnnnnnnnnnnnnnnnnnnnnnnnnnnnnnnnnnnnnnnnnnnnnnnnnnnnnnnnnnnnnnnnnnnnnnnnnnnnnnnnnnnnnnnnnnnnnnnnnnnnnnnnnnnnnnnnnnnnnnnnnnnnnnnnnnnnnnnnnnnnnnnnnnnnnnnnnnnnnnnnnnnnnnnnnnnnnnnnnnnnnnnnnnnnnnnnnnnnnnnnnnnnnnnnnnnnnnnnnnnnnnnnnnnnnnnnnnnnnnnnnnnnnnnnnnnnnnnnnnnnnnnnnnnnnnnnnnnnnnnnnnnnnnnnnnnnnnnnnnnnnnnnnnnnnnnnnnnnnnnnnnnnnnnnnnnnnnnnnnnnnnnnnnnnnnnnnnnnnnnnnnnnnnnnnnnnnnnnnnnnnnnnnnnnnnnnnnnnnnnnnnnnnnnnnnnnnnnnnnnnnnnnnnnnnnnnnnnnnnnnnnnnnnnnnnnnnnnnnnnnnnnnnnnnnnnnnnnnnnnnnnnnnnnnnnnnnnnnnnnnnnnnnnnnnnnnnnnnnnnnnnnnnnnnnnnnnnnnnnnnnnnnnnnnnnnnnnnnnnnnnnnnnnnnnnnnnnnnnnnnnnnnnnnnnnnnnnnnnnnnnnnnnnnnnnnnnnnnnnnnnnnnnnnnnnnnnnnnnnnnnnnnnnnnnnnnnnnnnnnnnnnnnnnnnnnnnnnnnnnnnnnnnnnnnnnnnnnnnnnnnnnnnnnnnnnnnnnnnnnnnnnnnnnnnnnnnnnnnnnnnnnnnnnnnnnnnnnnnnnnnnnnnnnnnnnnnnnnnnnnnnnnnnnnnnnnnnnnnnnnnnnnnnnnnnnnnnnnnnnnnnnnnnnnnnnnnnnnnnnnnnnnnnnnnnnnnnnnnnnnnnnnnnnnnnnnnnnnnnnnnnnnnnnnnnnnnnnnnnnnnnnnnnnnnnnnnnnnnnnnnnnnnnnnnnnnnnnnnnnnnnnnnnnnnnnnnnnnnnnnnnnnnnnnnnnnnnnnnnnnnnnnnnnnnnnnnnnnnnnnnnnnnnnnnnnnnnnnnnnnnnnnnnnnnnnnnnnnnnnnnnnnnnnnnnnnnnnnnnnnnnnnnnnnnnnnnnnnnnnnnnnnnnnnnnnnnnnnnnnnnnnnnnnnnnnnnnnnnnnnnnnnnnnnnnnnnnnnnnnnnnnnnnnnnnnnnnnnnnnnnnnnnnnnnnnnnnnnnnnnnnnnnnnnnnnnnnnnnnnnnnnnnnnnnnnnnnnnnnnnnnnnnnnnnnnnnnnnnnnnnnnnnnnnnnnnnnnnnnnnnnnnnnnnnnnnnnnnnnnnnnnnnnnnnnnnnnnnnnnnnnnnnnnnnnnnnnnnnnnnnnnnnnnnnnnnnnnnnnnnnnnnnnnnnnnnnnnnnnnnnnnnnnnnnnnnnnnnnnnnnnnnnnnnnnnnnnnnnnnnnnnnnnnnnnnnnnnnnnnnnnnnnnnnnnnnnnnnnnnnnnnnnnnnnnnnnnnnnnnnnnnnnnnnnnnnnnnnnnnnnnnnnnnnnnnnnnnnnnnnnnnnnnnnnnnnnnnnnnnnnnnnnnnnnnnnnnnnnnnnnnnnnnnnnnnnnnnnnnnnnnnnnnnnnnnnnnnnnnnnnnnnnnnnnnnnnnnnnnnnnnnnnnnnnnnnnnnnnnnnnnnnnnnnnnnnnnnnnnnnnnnnnnnnnnnnnnnnnnnnnnnnnnnnnnnnnnnnnnnnnnnnnnnnnnnnnnnnnnnnnnnnnnnnnnnnnnnnnnnnnnnnnnnnnnnnnnnnnnnnnnnnnnnnnnnnnnnnnnnnnnnnnnnnnnnnnnnnnnnnnnnnnnnnnnnnnnnnnnnnnnnnnnnnnnnnnnnnnnnnnnnnnnnnnnnnnnnnnnnnnnnnnnnnnnnnnnnnnnnnnnnnnnnnnnnnnnnnnnnnnnnnnnnnnnnnnnnnnnnnnnnnnnnnnnnnnnnnnnnnnnnnnnnnnnnnnnnnnnnnnnnnnnnnnnnnnnnnnnnnnnnnnnnnnnnnnnnnnnnnnnnnnnnnnnnnnnnnnnnnnnnnnnnnnnnnnnnnnnnnnnnnnnnnnnnnnnnnnnnnnnnnnnnnnnnnnnnnnnnnnnnnnnnnnnnnnnnnnnnnnnnnnnnnnnnnnnnnnnnnnnnnnnnnnnnnnnnnnnnnnnnnnnnnnnnnnnnnnnnnnnnnnnnnnnnnnnnnnnnnnnnnnnnnnnnnnnnnnnnnnnnnnnnnnnnnnnnnnnnnnnnnnnnnnnnnnnnnnnnnnnnnnnnnnnnnnnnnnnnnnnnnnnnnnnnnnnnnnnnnnnnnnnnnnnnnnnnnnnnnnnnnnnnnnnnnnnnnnnnnnnnnnnnnnnnnnnnnnnnnnnnnnnnnnnnnnnnnnnnnnnnnnnnnnnnnnnnnnnnnnnnnnnnnnnnnnnnnnnnnnnnnnnnnnnnnnnnnnnnnnnnnnnnnnnnnnnnnnnnnnnnnnnnnnnnnnnnnnnnnnnnnnnnnnnnnnnnnnnnnnnnnnnnnnnnnnnnnnnnnnnnnnnnnnnnnnnnnnnnnnnnnnnnnnnnnnnnnnnnnnnnnnnnnnnnnnnnnnnnnnnnnnnnnnnnnnnnnnnnnnnnnnnnnnnnnnnnnnnnnnnnnnnnnnnnnnnnnnnnnnnnnnnnnnnnnnnnnnnnnnnnnnnnnnnnnnnnnnnnnnnnnnnnnnnnnnnnnnnnnnnnnnnnnnnnnnnnnnnnnnnnnnnnnnnnnnnnnnnnnnnnnnnnnnnnnnnnnnnnnnnnnnnnnnnnnnnnnnnnnnnnnnnnnnnnnnnnnnnnnnnnnnnnnnnnnnnnnnnnnnnnnnnnnnnnnnnnnnnnnnnnnnnnnnnnnnnnnnnnnnnnnnnnnnnnnnnnnnnnnnnnnnnnnnnnnnnnnnnnnnnnnnnnnnnnnnnnnnnnnnnnnnnnnnnnnnnnnnnnnnnnnnnnnnnnnnnnnnnnnnnnnnnnnnnnnnnnnnnnnnnnnnnnnnnnnnnnnnnnnnnnnnnnnnnnnnnnnnnnnnnnnnnnnnnnnnnnnnnnnnnnnnnnnnnnnnnnnnnnnnnnnnnnnnnnnnnnnnnnnnnnnnnnnnnnnnnnnnnnnnnnnnnnnnnnnnnnnnnnnnnnnnnnnnnnnnnnnnnnnnnnnnnnnnnnnnnnnnnnnnnnnnnnnnnnnnnnnnnnnnnnnnnnnnnnnnnnnnnnnnnnnnnnnnnnnnnnnnnnnnnnnnnnnnnnnnnnnnnnnnnnnnnnnnnnnnnnnnnnnnnnnnnnnnnnnnnnnnnnnnnnnnnnnnnnnnnnnnnnnnnnnnnnnnnnnnnnnnnnnnnnnnnnnnnnnnnnnnnnnnnnnnnnnnnnnnnnnnnnnnnnnnnnnnnnnnnnnnnnnnnnnnnnnnnnnnnnnnnnnnnnnnnnnnnnnnnnnnnnnnnnnnnnnnnnnnnnnnnnnnnnnnnnnnnnnnnnnnnnnnnnnnnnnnnnnnnnnnnnnnnnnnnnnnnnnnnnnnnnnnnnnnnnnnnnnnnnnnnnnnnnnnnnnnnnnnnnnnnnnnnnnnnnnnnnnnnnnnnnnnnnnnnnnnnnnnnnnnnnnnnnnnnnnnnnnnnnnnnnnnnnnnnnnnnnnnnnnnnnnnnnnnnnnnnnnnnnnnnnnnnnnnnnnnnnnnnnnnnnnnnnnnnnnnnnnnnnnnnnnnnnnnnnnnnnnnnnnnnnnnnnnnnnnnnnnnnnnnnnnnnnnnnnnnnnnnnnnnnnnnnnnnnnnnnnnnnnnnnnnnnnnnnnnnnnnnnnnnnnnnnnnnnnnnnnnnnnnnnnnnnnnnnnnnnnnnnnnnnnnnnnnnnnnnnnnnnnnnnnnnnnnnnnnnnnnnnnnnnnnnnnnnnnnnnnnnnnnnnnnnnnnnnnnnnnnnnnnnnnnnnnnnnnnnnnnnnnnnnnnnnnnnnnnnnnnnnnnnnnnnnnnnnnnnnnnnnnnnnnnnnnnnnnnnnnnnnnnnnnnnnnnnnnnnnnnnnnnnnnnnnnnnnnnnnnnnnnnnnnnnnnnnnnnnnnnnnnnnnnnnnnnnnnnnnnnnnnnnnnnnnnnnnnnnnnnnnnnnnnnnnnnnnnnnnnnnnnnnnnnnnnnnnnnnnnnnnnnnnnnnnnnnnnnnnnnnnnnnnnnnnnnnnnnnnnnnnnnnnnnnnnnnnnnnnnnnnnnnnnnnnnnnnnnnnnnnnnnnnnnnnnnnnnnnnnnnnnnnnnnnnnnnnnnnnnnnnnnnnnnnnnnnnnnnnnnnnnnnnnnnnnnnnnnnnnnnnnnnnnnnnnnnnnnnnnnnnnnnnnnnnnnnnnnnnnnnnnnnnnnnnnnnnnnnnnnnnnnnnnnnnnnnnnnnnnnnnnnnnnnnnnnnnnnnnnnnnnnnnnnnnnnnnnnnnnnnnnnnnnnnnnnnnnnnnnnnnnnnnnnnnnnnnnnnnnnnnnnnnnnnnnnnnnnnnnnnnnnnnnnnnnnnnnnnnnnnnnnnnnnnnnnnnnnnnnnnnnnnnnnnnnnnnnnnnnnnnnnnnnnnnnnnnnnnnnnnnnnnnnnnnnnnnnnnnnnnnnnnnnnnnnnnnnnnnnnnnnnnnnnnnnnnnnnnnnnnnnnnnnnnnnnnnnnnnnnnnnnnnnnnnnnnnnnnnnnnnnnnnnnnnnnnnnnnnnnnnnnnnnnnnnnnnnnnnnnnnnnnnnnnnnnnnnnnnnnnnnnnnnnnnnnnnnnnnnnnnnnnnnnnnnnnnnnnnnnnnnnnnnnnnnnnnnnnnnnnnnnnnnnnnnnnnnnnnnnnnnnnnnnnnnnnnnnnnnnnnnnnnnnnnnnnnnnnnnnnnnnnnnnnnnnnnnnnnnnnnnnnnnnnnnnnnnnnnnnnnnnnnnnnnnnnnnnnnnnnnnnnnnnnnnnnnnnnnnnnnnnnnnnnnnnnnnnnnnnnnnnnnnnnnnnnnnnnnnnnnnnnnnnnnnnnnnnnnnnnnnnnnnnnnnnnnnnnnnnnnnnnnnnnnnnnnnnnnnnnnnnnnnnnnnnnnnnnnnnnnnnnnnnnnnnnnnnnnnnnnnnnnnnnnnnnnnnnnnnnnnnnnnnnnnnnnnnnnnnnnnnnnnnnnnnnnnnnnnnnnnnnnnnnnnnnnnnnnnnnnnnnnnnnnnnnnnnnnnnnnnnnnnnnnnnnnnnnnnnnnnnnnnnnnnnnnnnnnnnnnnnnnnnnnnnnnnnnnnnnnnnnnnnnnnnnnnnnnnnnnnnnnnnnnnnnnnnnnnnnnnnnnnnnnnnnnnnnnnnnnnnnnnnnnnnnnnnnnnnnnnnnnnnnnnnnnnnnnnnnnnnnnnnnnnnnnnnnnnnnnnnnnnnnnnnnnnnnnnnnnnnnnnnnnnnnnnnnnnnnnnnnnnnnnnnnnnnnnnnnnnnnnnnnnnnnnnnnnnnnnnnnnnnnnnnnnnnnnnnnnnnnnnnnnnnnnnnnnnnnnnnnnnnnnnnnnnnnnnnnnnnnnnnnnnnnnnnnnnnnnnnnnnnnnnnnnnnnnnnnnnnnnnnnnnnnnnnnnnnnnnnnnnnnnnnnnnnnnnnnnnnnnnnnnnnnnnnnnnnnnnnnnnnnnnnnnnnnnnnnnnnnnnnnnnnnnnnnnnnnnnnnnnnnnnnnnnnnnnnnnnnnnnnnnnnnnnnnnnnnnnnnnnnnnnnnnnnnnnnnnnnnnnnnnnnnnnnnnnnnnnnnnnnnnnnnnnnnnnnnnnnnnnnnnnnnnnnnnnnnnnnnnnnnnnnnnnnnnnnnnnnnnnnnnnnnnnnnnnnnnnnnnnnnnnnnnnnnnnnnnnnnnnnnnnnnnnnnnnnnnnnnnnnnnnnnnnnnnnnnnnnnnnnnnnnnnnnnnnnnnnnnnnnnnnnnnnnnnnnnnnnnnnnnnnnnnnnnnnnnnnnnnnnnnnnnnnnnnnnnnnnnnnnnnnnnnnnnnnnnnnnnnnnnnnnnnnnnnnnnnnnnnnnnnnnnnnnnnnnnnnnnnnnnnnnnnnnnnnnnnnnnnnnnnnnnnnnnnnnnnnnnnnnnnnnnnnnnnnnnnnnnnnnnnnnnnnnnnnnnnnnnnnnnnnnnnnnnnnnnnnnnnnnnnnnnnnnnnnnnnnnnnnnnnnnnnnnnnnnnnnnnnnnnnnnnnnnnnnnnnnnnnnnnnnnnnnnnnnnnnnnnnnnnnnnnnnnnnnnnnnnnnnnnnnnnnnnnnnnnnnnnnnnnnnnnnnnnnnnnnnnnnnnnnnnnnnnnnnnnnnnnnnnnnnnnnnnnnnnnnnnnnnnnnnnnnnnnnnnnnnnnnnnnnnnnnnnnnnnnnnnnnnnnnnnnnnnnnnnnnnnnnnnnnnnnnnnnnnnnnnnnnnnnnnnnnnnnnnnnnnnnnnnnnnnnnnnnnnnnnnnnnnnnnnnnnnnnnnnnnnnnnnnnnnnnnnnnnnnnnnnnnnnnnnnnnnnnnnnnnnnnnnnnnnnnnnnnnnnnnnnnnnnnnnnnnnnnnnnnnnnnnnnnnnnnnnnnnnnnnnnnnnnnnnnnnnnnnnnnnnnnnnnnnnnnnnnnnnnnnnnnnnnnnnnnnnnnnnnnnnnnnnnnnnnnnnnnnnnnnnnnnnnnnnnnnnnnnnnnnnnnnnnnnnnnnnnnnnnnnnnnnnnnnnnnnnnnnnnnnnnnnnnnnnnnnnnnnnnnnnnnnnnnnnnnnnnnnnnnnnnnnnnnnnnnnnnnnnnnnnnnnnnnnnnnnnnnnnnnnnnnnnnnnnnnnnnnnnnnnnnnnnnnnnnnnnnnnnnnnnnnnnnnnnnnnnnnnnnnnnnnnnnnnnnnnnnnnnnnnnnnnnnnnnnnnnnnnnnnnnnnnnnnnnnnnnnnnnnnnnnnnnnnnnnnnnnnnnnnnnnnnnnnnnnnnnnnnnnnnnnnnnnnnnnnnnnnnnnnnnnnnnnnnnnnnnnnnnnnnnnnnnnnnnnnnnnnnnnnnnnnnnnnnnnnnnnnnnnnnnnnnnnnnnnnnnnnnnnnnnnnnnnnnnnnnnnnnnnnnnnnnnnnnnnnnnnnnnnnnnnnnnnnnnnnnnnnnnnnnnnnnnnnnnnnnnnnnnnnnnnnnnnnnnnnnnnnnnnnnnnnnnnnnnnnnnnnnnnnnnnnnnnnnnnnnnnnnnnnnnnnnnnnnnnnnnnnnnnnnnnnnnnnnnnnnnnnnnnnnnnnnnnnnnnnnnnnnnnnnnnnnnnnnnnnnnnnnnnnnnnnnnnnnnnnnnnnnnnnnnnnnnnnnnnnnnnnnnnnnnnnnnnnnnnnnnnnnnnnnnnnnnnnnnnnnnnnnnnnnnnnnnnnnnnnnnnnnnnnnnnnnnnnnnnnnnnnnnnnnnnnnnnnnnnnnnnnnnnnnnnnnnnnnnnnnnnnnnnnnnnnnnnnnnnnnnnnnnnnnnnnnnnnnnnnnnnnnnnnnnnnnnnnnnnnnnnnnnnnnnnnnnnnnnnnnnnnnnnnnnnnnnnnnnnnnnnnnnnnnnnnnnnnnnnnnnnnnnnnnnnnnnnnnnnnnnnnnnnnnnnnnnnnnnnnnnnnnnnnnnnnnnnnnnnnnnnnnnnnnnnnnnnnnnnnnnnnnnnnnnnnnnnnnnnnnnnnnnnnnnnnnnnnnnnnnnnnnnnnnnnnnnnnnnnnnnnnnnnnnnnnnnnnnnnnnnnnnnnnnnnnnnnnnnnnnnnnnnnnnnnnnnnnnnnnnnnnnnnnnnnnnnnnnnnnnnnnnnnnnnnnnnnnnnnnnnnnnnnnnnnnnnnnnnnnnnnnnnnnnnnnnnnnnnnnnnnnnnnnnnnnnnnnnnnnnnnnnnnnnnnnnnnnnnnnnnnnnnnnnnnnnnnnnnnnnnnnnnnnnnnnnnnnnnnnnnnnnnnnnnnnnnnnnnnnnnnnnnnnnnnnnnnnnnnnnnnnnnnnnnnnnnnnnnnnnnnnnnnnnnnnnnnnnnnnnnnnnnnnnnnnnnnnnnnnnnnnnnnnnnnnnnnnnnnnnnnnnnnnnnnnnnnnnnnnnnnnnnnnnnnnnnnnnnnnnnnnnnnnnnnnnnnnnnnnnnnnnnnnnnnnnnnnnnnnnnnnnnnnnnnnnnnnnnnnnnnnnnnnnnnnnnnnnnnnnnnnnnnnnnnnnnnnnnnnnnnnnnnnnnnnnnnnnnnnnnnnnnnnnnnnnnnnnnnnnnnnnnnnnnnnnnnnnnnnnnnnnnnnnnnnnnnnnnnnnnnnnnnnnnnnnnnnnnnnnnnnnnnnnnnnnnnnnnnnnnnnnnnnnnnnnnnnnnnnnnnnnnnnnnnnnnnnnnnnnnnnnnnnnnnnnnnnnnnnnnnnnnnnnnnnnnnnnnnnnnnnnnnnnnnnnnnnnnnnnnnnnnnnnnnnnnnnnnnnnnnnnnnnnnnnnnnnnnnnnnnnnnnnnnnnnnnnnnnnnnnnnnnnnnnnnnnnnnnnnnnnnnnnnnnnnnnnnnnnnnnnnnnnnnnnnnnnnnnnnnnnnnnnnnnnnnnnnnnnnnnnnnnnnnnnnnnnnnnnnnnnnnnnnnnnnnnnnnnnnnnnnnnnnnnnnnnnnnnnnnnnnnnnnnnnnnnnnnnnnnnnnnnnnnnnnnnnnnnnnnnnnnnnnnnnnnnnnnnnnnnnnnnnnnnnnnnnnnnnnnnnnnnnnnnnnnnnnnnnnnnnnnnnnnnnnnnnnnnnnnnnnnnnnnnnnnnnnnnnnnnnnnnnnnnnnnnnnnnnnnnnnnnnnnnnnnnnnnnnnnnnnnnnnnnnnnnnnnnnnnnnnnnnnnnnnnnnnnnnnnnnnnnnnnnnnnnnnnnnnnnnnnnnnnnnnnnnnnnnnnnnnnnnnnnnnnnnnnnnnnnnnnnnnnnnnnnnnnnnnnnnnnnnnnnnnnnnnnnnnnnnnnnnnnnnnnnnnnnnnnnnnnnnnnnnnnnnnnnnnnnnnnnnnnnnnnnnnnnnnnnnnnnnnnnnnnnnnnnnnnnnnnnnnnnnnnnnnnnnnnnnnnnnnnnnnnnnnnnnnnnnnnnnnnnnnnnnnnnnnnnnnnnnnnnnnnnnnnnnnnnnnnnnnnnnnnnnnnnnnnnnnnnnnnnnnnnnnnnnnnnnnnnnnnnnnnnnnnnnnnnnnnnnnnnnnnnnnnnnnnnnnnnnnnnnnnnnnnnnnnnnnnnnnnnnnnnnnnnnnnnnnnnnnnnnnnnnnnnnnnnnnnnnnnnnnnnnnnnnnnnnnnnnnnnnnnnnnnnnnnnnnnnnnnnnnnnnnnnnnnnnnnnnnnnnnnnnnnnnnnnnnnnnnnnnnnnnnnnnnnnnnnnnnnnnnnnnnnnnnnnnnnnnnnnnnnnnnnnnnnnnnnnnnnnnnnnnnnnnnnnnnnnnnnnnnnnnnnnnnnnnnnnnnnnnnnnnnnnnnnnnnnnnnnnnnnnnnnnnnnnnnnnnnnnnnnnnnnnnnnnnnnnnnnnnnnnnnnnnnnnnnnnnnnnnnnnnnnnnnnnnnnnnnnnnnnnnnnnnnnnnnnnnnnnnnnnnnnnnnnnnnnnnnnnnnnnnnnnnnnnnnnnnnnnnnnnnnnnnnnnnnnnnnnnnnnnnnnnnnnnnnnnnnnnnnnnnnnnnnnnnnnnnnnnnnnnnnnnnnnnnnnnnnnnnnnnnnnnnnnnnnnnnnnnnnnnnnnnnnnnnnnnnnnnnnnnnnnnnnnnnnnnnnnnnnnnnnnnnnnnnnnnnnnnnnnnnnnnnnnnnnnnnnnnnnnnnnnnnnnnnnnnnnnnnnnnnnnnnnnnnnnnnnnnnnnnnnnnnnnnnnnnnnnnnnnnnnnnnnnnnnnnnnnnnnnnnnnnnnnnnnnnnnnnnnnnnnnnnnnnnnnnnnnnnnnnnnnnnnnnnnnnnnnnnnnnnnnnnnnnnnnnnnnnnnnnnnnnnnnnnnnnnnnnnnnnnnnnnnnnnnnnnnnnnnnnnnnnnnnnnnnnnnnnnnnnnnnnnnnnnnnnnnnnnnnnnnnnnnnnnnnnnnnnnnnnnnnnnnnnnnnnnnnnnnnnnnnnnnnnnnnnnnnnnnnnnnnnnnnnnnnnnnnnnnnnnnnnnnnnnnnnnnnnnnnnnnnnnnnnnnnnnnnnnnnnnnnnnnnnnnnnnnnnnnnnnnnnnnnnnnnnnnnnnnnnnnnnnnnnnnnnnnnnnnnnnnnnnnnnnnnnnnnnnnnnnnnnnnnnnnnnnnnnnnnnnnnnnnnnnnnnnnnnnnnnnnnnnnnnnnnnnnnnnnnnnnnnnnnnnnnnnnnnnnnnnnnnnnnnnnnnnnnnnnnnnnnnnnnnnnnnnnnnnnnnnnnnnnnnnnnnnnnnnnnnnnnnnnnnnnnnnnnnnnnnnnnnnnnnnnnnnnnnnnnnnnnnnnnnnnnnnnnnnnnnnnnnnnnnnnnnnnnnnnnnnnnnnnnnnnnnnnnnnnnnnnnnnnnnnnnnnnnnnnnnnnnnnnnnnnnnnnnnnnnnnnnnnnnnnnnnnnnnnnnnnnnnnnnnnnnnnnnnnnnnnnnnnnnnnnnnnnnnnnnnnnnnnnnnnnnnnnnnnnnnnnnnnnnnnnnnnnnnnnnnnnnnnnnnnnnnnnnnnnnnnnnnnnnnnnnnnnnnnnnnnnnnnnnnnnnnnnnnnnnnnnnnnnnnnnnnnnnnnnnnnnnnnnnnnnnnnnnnnnnnnnnnnnnnnnnnnnnnnnnnnnnnnnnnnnnnnnnnnnnnnnnnnnnnnnnnnnnnnnnnnnnnnnnnnnnnnnnnnnnnnnnnnnnnnnnnnnnnnnnnnnnnnnnnnnnnnnnnnnnnnnnnnnnnnnnnnnnnnnnnnnnnnnnnnnnnnnnnnnnnnnnnnnnnnnnnnnnnnnnnnnnnnnnnnnnnnnnnnnnnnnnnnnnnnnnnnnnnnnnnnnnnnnnnnnnnnnnnnnnnnnnnnnnnnnnnnnnnnnnnnnnnnnnnnnnnnnnnnnnnnnnnnnnnnnnnnnnnnnnnnnnnnnnnnnnnnnnnnnnnnnnnnnnnnnnnnnnnnnnnnnnnnnnnnnnnnnnnnnnnnnnnnnnnnnnnnnnnnnnnnnnnnnnnnnnnnnnnnnnnnnnnnnnnnnnnnnnnnnnnnnnnnnnnnnnnnnnnnnnnnnnnnnnnnnnnnnnnnnnnnnnnnnnnnnnnnnnnnnnnnnnnnnnnnnnnnnnnnnnnnnnnnnnnnnnnnnnnnnnnnnnnnnnnnnnnnnnnnnnnnnnnnnnnnnnnnnnnnnnnnnnnnnnnnnnnnnnnnnnnnnnnnnnnnnnnnnnnnnnnnnnnnnnnnnnnnnnnnnnnnnnnnnnnnnnnnnnnnnnnnnnnnnnnnnnnnnnnnnnnnnnnnnnnnnnnnnnnnnnnnnnnnnnnnnnnnnnnnnnnnnnnnnnnnnnnnnnnnnnnnnnnnnnnnnnnnnnnnnnnnnnnnnnnnnnnnnnnnnnnnnnnnnnnnnnnnnnnnnnnnnnnnnnnnnnnnnnnnnnnnnnnnnnnnnnnnnnnnnnnnnnnnnnnnnnnnnnnnnnnnnnnnnnnnnnnnnnnnnnnnnnnnnnnnnnnnnnnnnnnnnnnnnnnnnnnnnnnnnnnnnnnnnnnnnnnnnnnnnnnnnnnnnnnnnnnnnnnnnnnnnnnnnnnnnnnnnnnnnnnnnnnnnnnnnnnnnnnnnnnnnnnnnnnnnnnnnnnnnnnnnnnnnnnnnnnnnnnnnnnnnnnnnnnnnnnnnnnnnnnnnnnnnnnnnnnnnnnnnnnnnnnnnnnnnnnnnnnnnnnnnnnnnnnnnnnnnnnnnnnnnnnnnnnnnnnnnnnnnnnnnnnnnnnnnnnnnnnnnnnnnnnnnnnnnnnnnnnnnnnnnnnnnnnnnnnnnnnnnnnnnnnnnnnnnnnnnnnnnnnnnnnnnnnnnnnnnnnnnnnnnnnnnnnnnnnnnnnnnnnnnnnnnnnnnnnnnnnnnnnnnnnnnnnnnnnnnnnnnnnnnnnnnnnnnnnnnnnnnnnnnnnnnnnnnnnnnnnnnnnnnnnnnnnnnnnnnnnnnnnnnnnnnnnnnnnnnnnnnnnnnnnnnnnnnnnnnnnnnnnnnnnnnnnnnnnnnnnnnnnnnnnnnnnnnnnnnnnnnnnnnnnnnnnnnnnnnnnnnnnnnnnnnnnnnnnnnnnnnnnnnnnnnnnnnnnnnnnnnnnnnnnnnnnnnnnnnnnnnnnnnnnnnnnnnnnnnnnnnnnnnnnnnnnnnnnnnnnnnnnnnnnnnnnnnnnnnnnnnnnnnnnnnnnnnnnnnnnnnnnnnnnnnnnnnnnnnnnnnnnnnnnnnnnnnnnnnnnnnnnnnnnnnnnnnnnnnnnnnnnnnnnnnnnnnnnnnnnnnnnnnnnnnnnnnnnnnnnnnnnnnnnnnnnnnnnnnnnnnnnnnnnnnnnnnnnnnnnnnnnnnnnnnnnnnnnnnnnnnnnnnnnnnnnnnnnnnnnnnnnnnnnnnnnnnnnnnnnnnnnnnnnnnnnnnnnnnnnnnnnnnnnnnnnnnnnnnnnnnnnnnnnnnnnnnnnnnnnnnnnnnnnnnnnnnnnnnnnnnnnnnnnnnnnnnnnnnnnnnnnnnnnnnnnnnnnnnnnnnnnnnnnnnnnnnnnnnnnnnnnnnnnnnnnnnnnnnnnnnnnnnnnnnnnnnnnnnnnnnnnnnnnnnnnnnnnnnnnnnnnnnnnnnnnnnnnnnnnnnnnnnnnnnnnnnnnnnnnnnnnnnnnnnnnnnnnnnnnnnnnnnnnnnnnnnnnnnnnnnnnnnnnnnnnnnnnnnnnnnnnnnnnnnnnnnnnnnnnnnnnnnnnnnnnnnnnnnnnnnnnnnnnnnnnnnnnnnnnnnnnnnnnnnnnnnnnnnnnnnnnnnnnnnnnnnnnnnnnnnnnnnnnnnnnnnnnnnnnnnnnnnnnnnnnnnnnnnnnnnnnnnnnnnnnnnnnnnnnnnnnnnnnnnnnnnnnnnnnnnnnnnnnnnnnnnnnnnnnnnnnnnnnnnnnnnnnnnnnnnnnnnnnnnnnnnnnnnnnnnnnnnnnnnnnnnnnnnnnnnnnnnnnnnnnnnnnnnnnnnnnnnnnnnnnnnnnnnnnnnnnnnnnnnnnnnnnnnnnnnnnnnnnnnnnnnnnnnnnnnnnnnnnnnnnnnnnnnnnnnnnnnnnnnnnnnnnnnnnnnnnnnnnnnnnnnnnnnnnnnnnnnnnnnnnnnnnnnnnnnnnnnnnnnnnnnnnnnnnnnnnnnnnnnnnnnnnnnnnnnnnnnnnnnnnnnnnnnnnnnnnnnnnnnnnnnnnnnnnnnnnnnnnnnnnnnnnnnnnnnnnnnnnnnnnnnnnnnnnnnnnnnnnnnnnnnnnnnnnnnnnnnnnnnnnnnnnnnnnnnnnnnnnnnnnnnnnnnnnnnnnnnnnnnnnnnnnnnnnnnnnnnnnnnnnnnnnnnnnnnnnnnnnnnnnnnnnnnnnnnnnnnnnnnnnnnnnnnnnnnnnnnnnnnnnnnnnnnnnnnnnnnnnnnnnnnnnnnnnnnnnnnnnnnnnnnnnnnnnnnnnnnnnnnnnnnnnnnnnnnnnnnnnnnnnnnnnnnnnnnnnnnnnnnnnnnnnnnnnnnnnnnnnnnnnnnnnnnnnnnnnnnnnnnnnnnnnnnnnnnnnnnnnnnnnnnnnnnnnnnnnnnnnnnnnnnnnnnnnnnnnnnnnnnnnnnnnnnnnnnnnnnnnnnnnnnnnnnnnnnnnnnnnnnnnnnnnnnnnnnnnnnnnnnnnnnnnnnnnnnnnnnnnnnnnnnnnnnnnnnnnnnnnnnnnnnnnnnnnnnnnnnnnnnnnnnnnnnnnnnnnnnnnnnnnnnnnnnnnnnnnnnnnnnnnnnnnnnnnnnnnnnnnnnnnnnnnnnnnnnnnnnnnnnnnnnnnnnnnnnnnnnnnnnnnnnnnnnnnnnnnnnnnnnnnnnnnnnnnnnnnnnnnnnnnnnnnnnnnnnnnnnnnnnnnnnnnnnnnnnnnnnnnnnnnnnnnnnnnnnnnnnnnnnnnnnnnnnnnnnnnnnnnnnnnnnnnnnnnnnnnnnnnnnnnnnnnnnnnnnnnnnnnnnnnnnnnnnnnnnnnnnnnnnnnnnnnnnnnnnnnnnnnnnnnnnnnnnnnnnnnnnnnnnnnnnnnnnnnnnnnnnnnnnnnnnnnnnnnnnnnnnnnnnnnnnnnnnnnnnnnnnnnnnnnnnnnnnnnnnnnnnnnnnnnnnnnnnnnnnnnnnnnnnnnnnnnnnnnnnnnnnnnnnnnnnnnnnnnnnnnnnnnnnnnnnnnnnnnnnnnnnnnnnnnnnnnnnnnnnnnnnnnnnnnnnnnnnnnnnnnnnnnnnnnnnnnnnnnnnnnnnnnnnnnnnnnnnnnnnnnnnnnnnnnnnnnnnnnnnnnnnnnnnnnnnnnnnnnnnnnnnnnnnnnnnnnnnnnnnnnnnnnnnnnnnnnnnnnnnnnnnnnnnnnnnnnnnnnnnnnnnnnnnnnnnnnnnnnnnnnnnnnnnnnnnnnnnnnnnnnnnnnnnnnnnnnnnnnnnnnnnnnnnnnnnnnnnnnnnnnnnnnnnnnnnnnnnnnnnnnnnnnnnnnnnnnnnnnnnnnnnnnnnnnnnnnnnnnnnnnnnnnnnnnnnnnnnnnnnnnnnnnnnnnnnnnnnnnnnnnnnnnnnnnnnnnnnnnnnnnnnnnnnnnnnnnnnnnnnnnnnnnnnnnnnnnnnnnnnnnnnnnnnnnnnnnnnnnnnnnnnnnnnnnnnnnnnnnnnnnnnnnnnnnnnnnnnnnnnnnnnnnnnnnnnnnnnnnnnnnnnnnnnnnnnnnnnnnnnnnnnnnnnnnnnnnnnnnnnnnnnnnnnnnnnnnnnnnnnnnnnnnnnnnnnnnnnnnnnnnnnnnnnnnnnnnnnnnnnnnnnnnnnnnnnnnnnnnnnnnnnnnnnnnnnnnnnnnnnnnnnnnnnnnnnnnnnnnnnnnnnnnnnnnnnnnnnnnnnnnnnnnnnnnnnnnnnnnnnnnnnnnnnnnnnnnnnnnnnnnnnnnnnnnnnnnnnnnnnnnnnnnnnnnnnnnnnnnnnnnnnnnnnnnnnnnnnnnnnnnnnnnnnnnnnnnnnnnnnnnnnnnnnnnnnnnnnnnnnnnnnnnnnnnnnnnnnnnnnnnnnnnnnnnnnnnnnnnnnnnnnnnnnnnnnnnnnnnnnnnnnnnnnnnnnnnnnnnnnnnnnnnnnnnnnnnnnnnnnnnnnnnnnnnnnnnnnnnnnnnnnnnnnnnnnnnnnnnnnnnnnnnnnnnnnnnnnnnnnnnnnnnnnnnnnnnnnnnnnnnnnnnnnnnnnnnnnnnnnnnnnnnnnnnnnnnnnnnnnnnnnnnnnnnnnnnnnnnnnnnnnnnnnnnnnnnnnnnnnnnnnnnnnnnnnnnnnnnnnnnnnnnnnnnnnnnnnnnnnnnnnnnnnnnnnnnnnnnnnnnnnnnnnnnnnnnnnnnnnnnnnnnnnnnnnnnnnnnnnnnnnnnnnnnnnnnnnnnnnnnnnnnnnnnnnnnnnnnnnnnnnnnnnnnnnnnnnnnnnnnnnnnnnnnnnnnnnnnnnnnnnnnnnnnnnnnnnnnnnnnnnnnnnnnnnnnnnnnnnnnnnnnnnnnnnnnnnnnnnnnnnnnnnnnnnnnnnnnnnnnnnnnnnnnnnnnnnnnnnnnnnnnnnnnnnnnnnnnnnnnnnnnnnnnnnnnnnnnnnnnnnnnnnnnnnnnnnnnnnnnnnnnnnnnnnnnnnnnnnnnnnnnnnnnnnnnnnnnnnnnnnnnnnnnnnnnnnnnnnnnnnnnnnnnnnnnnnnnnnnnnnnnnnnnnnnnnnnnnnnnnnnnnnnnnnnnnnnnnnnnnnnnnnnnnnnnnnnnnnnnnnnnnnnnnnnnnnnnnnnnnnnnnnnnnnnnnnnnnnnnnnnnnnnnnnnnnnnnnnnnnnnnnnnnnnnnnnnnnnnnnnnnnnnnnnnnnnnnnnnnnnnnnnnnnnnnnnnnnnnnnnnnnnnnnnnnnnnnnnnnnnnnnnnnnnnnnnnnnnnnnnnnnnnnnnnnnnnnnnnnnnnnnnnnnnnnnnnnnnnnnnnnnnnnnnnnnnnnnnnnnnnnnnnnnnnnnnnnnnnnnnnnnnnnnnnnnnnnnnnnnnnnnnnnnnnnnnnnnnnnnnnnnnnnnnnnnnnnnnnnnnnnnnnnnnnnnnnnnnnnnnnnnnnnnnnnnnnnnnnnnnnnnnnnnnnnnnnnnnnnnnnnnnnnnnnnnnnnnnnnnnnnnnnnnnnnnnnnnnnnnnnnnnnnnnnnnnnnnnnnnnnnnnnnnnnnnnnnnnnnnnnnnnnnnnnnnnnnnnnnnnnnnnnnnnnnnnnnnnnnnnnnnnnnnnnnnnnnnnnnnnnnnnnnnnnnnnnnnnnnnnnnnnnnnnnnnnnnnnnnnnnnnnnnnnnnnnnnnnnnnnnnnnnnnnnnnnnnnnnnnnnnnnnnnnnnnnnnnnnnnnnnnnnnnnnnnnnnnnnnnnnnnnnnnnnnnnnnnnnnnnnnnnnnnnnnnnnnnnnnnnnnnnnnnnnnnnnnnnnnnnnnnnnnnnnnnnnnnnnnnnnnnnnnnnnnnnnnnnnnnnnnnnnnnnnnnnnnnnnnnnnnnnnnnnnnnnnnnnnnnnnnnnnnnnnnnnnnnnnnnnnnnnnnnnnnnnnnnnnnnnnnnnnnnnnnnnnnnnnnnnnnnnnnnnnnnnnnnnnnnnnnnnnnnnnnnnnnnnnnnnnnnnnnnnnnnnnnnnnnnnnnnnnnnnnnnnnnnnnnnnnnnnnnnnnnnnnnnnnnnnnnnnnnnnnnnnnnnnnnnnnnnnnnnnnnnnnnnnnnnnnnnnnnnnnnnnnnnnnnnnnnnnnnnnnnnnnnnnnnnnnnnnnnnnnnnnnnnnnnnnnnnnnnnnnnnnnnnnnnnnnnnnnnnnnnnnnnnnnnnnnnnnnnnnnnnnnnnnnnnnnnnnnnnnnnnnnnnnnnnnnnnnnnnnnnnnnnnnnnnnnnnnnnnnnnnnnnnnnnnnnnnnnnnnnnnnnnnnnnnnnnnnnnnnnnnnnnnnnnnnnnnnnnnnnnnnnnnnnnnnnnnnnnnnnnnnnnnnnnnnnnnnnnnnnnnnnnnnnnnnnnnnnnnnnnnnnnnnnnnnnnnnnnnnnnnnnnnnnnnnnnnnnnnnnnnnnnnnnnnnnnnnnnnnnnnnnnnnnnnnnnnnnnnnnnnnnnnnnnnnnnnnnnnnnnnnnnnnnnnnnnnnnnnnnnnnnnnnnnnnnnnnnnnnnnnnnnnnnnnnnnnnnnnnnnnnnnnnnnnnnnnnnnnnnnnnnnnnnnnnnnnnnnnnnnnnnnnnnnnnnnnnnnnnnnnnnnnnnnnnnnnnnnnnnnnnnnnnnnnnnnnnnnnnnnnnnnnnnnnnnnnnnnnnnnnnnnnnnnnnnnnnnnnnnnnnnnnnnnnnnnnnnnnnnnnnnnnnnnnnnnnnnnnnnnnnnnnnnnnnnnnnnnnnnnnnnnnnnnnnnnnnnnnnnnnnnnnnnnnnnnnnnnnnnnnnnnnnnnnnnnnnnnnnnnnnnnnnnnnnnnnnnnnnnnnnnnnnnnnnnnnnnnnnnnnnnnnnnnnnnnnnnnnnnnnnnnnnnnnnnnnnnnnnnnnnnnnnnnnnnnnnnnnnnnnnnnnnnnnnnnnnnnnnnnnnnnnnnnnnnnnnnnnnnnnnnnnnnnnnnnnnnnnnnnnnnnnnnnnnnnnnnnnnnnnnnnnnnnnnnnnnnnnnnnnnnnnnnnnnnnnnnnnnnnnnnnnnnnnnnnnnnnnnnnnnnnnnnnnnnnnnnnnnnnnnnnnnnnnnnnnnnnnnnnnnnnnnnnnnnnnnnnnnnnnnnnnnnnnnnnnnnnnnnnnnnnnnnnnnnnnnnnnnnnnnnnnnnnnnnnnnnnnnnnnnnnnnnnnnnnnnnnnnnnnnnnnnnnnnnnnnnnnnnnnnnnnnnnnnnnnnnnnnnnnnnnnnnnnnnnnnnnnnnnnnnnnnnnnnnnnnnnnnnnnnnnnnnnnnnnnnnnnnnnnnnnnnnnnnnnnnnnnnnnnnnnnnnnnnnnnnnnnnnnnnnnnnnnnnnnnnnnnnnnnnnnnnnnnnnnnnnnnnnnnnnnnnnnnnnnnnnnnnnnnnnnnnnnnnnnnnnnnnnnnnnnnnnnnnnnnnnnnnnnnnnnnnnnnnnnnnnnnnnnnnnnnnnnnnnnnnnnnnnnnnnnnnnnnnnnnnnnnnnnnnnnnnnnnnnnnnnnnnnnnnnnnnnnnnnnnnnnnnnnnnnnnnnnnnnnnnnnnnnnnnnnnnnnnnnnnnnnnnnnnnnnnnnnnnnnnnnnnnnnnnnnnnnnnnnnnnnnnnnnnnnnnnnnnnnnnnnnnnnnnnnnnnnnnnnnnnnnnnnnnnnnnnnnnnnnnnnnnnnnnnnnnnnnnnnnnnnnnnnnnnnnnnnnnnnnnnnnnnnnnnnnnnnnnnnnnnnnnnnnnnnnnnnnnnnnnnnnnnnnnnnnnnnnnnnnnnnnnnnnnnnnnnnnnnnnnnnnnnnnnnnnnnnnnnnnnnnnnnnnnnnnnnnnnnnnnnnnnnnnnnnnnnnnnnnnnnnnnnnnnnnnnnnnnnnnnnnnnnnnnnnnnnnnnnnnnnnnnnnnnnnnnnnnnnnnnnnnnnnnnnnnnnnnnnnnnnnnnnnnnnnnnnnnnnnnnnnnnnnnnnnnnnnnnnnnnnnnnnnnnnnnnnnnnnnnnnnnnnnnnnnnnnnnnnnnnnnnnnnnnnnnnnnnnnnnnnnnnnnnnnnnnnnnnnnnnnnnnnnnnnnnnnnnnnnnnnnnnnnnnnnnnnnnnnnnnnnnnnnnnnnnnnnnnnnnnnnnnnnnnnnnnnnnnnnnnnnnnnnnnnnnnnnnnnnnnnnnnnnnnnnnnnnnnnnnnnnnnnnnnnnnnnnnnnnnnnnnnnnnnnnnnnnnnnnnnnnnnnnnnnnnnnnnnnnnnnnnnnnnnnnnnnnnnnnnnnnnnnnnnnnnnnnnnnnnnnnnnnnnnnnnnnnnnnnnnnnnnnnnnnnnnnnnnnnnnnnnnnnnnnnnnnnnnnnnnnnnnnnnnnnnnnnnnnnnnnnnnnnnnnnnnnnnnnnnnnnnnnnnnnnnnnnnnnnnnnnnnnnnnnnnnnnnnnnnnnnnnnnnnnnnnnnnnnnnnnnnnnnnnnnnnnnnnnnnnnnnnnnnnnnnnnnnnnnnnnnnnnnnnnnnnnnnnnnnnnnnnnnnnnnnnnnnnnnnnnnnnnnnnnnnnnnnnnnnnnnnnnnnnnnnnnnnnnnnnnnnnnnnnnnnnnnnnnnnnnnnnnnnnnnnnnnnnnnnnnnnnnnnnnnnnnnnnnnnnnnnnnnnnnnnnnnnnnnnnnnnnnnnnnnnnnnnnnnnnnnnnnnnnnnnnnnnnnnnnnnnnnnnnnnnnnnnnnnnnnnnnnnnnnnnnnnnnnnnnnnnnnnnnnnnnnnnnnnnnnnnnnnnnnnnnnnnnnnnnnnnnnnnnnnnnnnnnnnnnnnnnnnnnnnnnnnnnnnnnnnnnnnnnnnnnnnnnnnnnnnnnnnnnnnnnnnnnnnnnnnnnnnnnnnnnnnnnnnnnnnnnnnnnnnnnnnnnnnnnnnnnnnnnnnnnnnnnnnnnnnnnnnnnnnnnnnnnnnnnnnnnnnnnnnnnnnnnnnnnnnnnnnnnnnnnnnnnnnnnnnnnnnnnnnnnnnnnnnnnnnnnnnnnnnnnnnnnnnnnnnnnnnnnnnnnnnnnnnnnnnnnnnnnnnnnnnnnnnnnnnnnnnnnnnnnnnnnnnnnnnnnnnnnnnnnnnnnnnnnnnnnnnnnnnnnnnnnnnnnnnnnnnnnnnnnnnnnnnnnnnnnnnnnnnnnnnnnnnnnnnnnnnnnnnnnnnnnnnnnnnnnnnnnnnnnnnnnnnnnnnnnnnnnnnnnnnnnnnnnnnnnnnnnnnnnnnnnnnnnnnnnnnnnnnnnnnnnnnnnnnnnnnnnnnnnnnnnnnnnnnnnnnnnnnnnnnnnnnnnnnnnnnnnnnnnnnnnnnnnnnnnnnnnnnnnnnnnnnnnnnnnnnnnnnnnnnnnnnnnnnnnnnnnnnnnnnnnnnnnnnnnnnnnnnnnnnnnnnnnnnnnnnnnnnnnnnnnnnnnnnnnnnnnnnnnnnnnnnnnnnnnnnnnnnnnnnnnnnnnnnnnnnnnnnnnnnnnnnnnnnnnnnnnnnnnnnnnnnnnnnnnnnnnnnnnnnnnnnnnnnnnnnnnnnnnnnnnnnnnnnnnnnnnnnnnnnnnnnnnnnnnnnnnnnnnnnnnnnnnnnnnnnnnnnnnnnnnnnnnnnnnnnnnnnnnnnnnnnnnnnnnnnnnnnnnnnnnnnnnnnnnnnnnnnnnnnnnnnnnnnnnnnnnnnnnnnnnnnnnnnnnnnnnnnnnnnnnnnnnnnnnnnnnnnnnnnnnnnnnnnnnnnnnnnnnnnnnnnnnnnnnnnnnnnnnnnnnnnnnnnnnnnnnnnnnnnnnnnnnnnnnnnnnnnnnnnnnnnnnnnnnnnnnnnnnnnnnnnnnnnnnnnnnnnnnnnnnnnnnnnnnnnnnnnnnnnnnnnnnnnnnnnnnnnnnnnnnnnnnnnnnnnnnnnnnnnnnnnnnnnnnnnnnnnnnnnnnnnnnnnnnnnnnnnnnnnnnnnnnnnnnnnnnnnnnnnnnnnnnnnnnnnnnnnnnnnnnnnnnnnnnnnnnnnnnnnnnnnnnnnnnnnnnnnnnnnnnnnnnnnnnnnnnnnnnnnnnnnnnnnnnnnnnnnnnnnnnnnnnnnnnnnnnnnnnnnnnnnnnnnnnnnnnnnnnnnnnnnnnnnnnnnnnnnnnnnnnnnnnnnnnnnnnnnnnnnnnnnnnnnnnnnnnnnnnnnnnnnnnnnnnnnnnnnnnnnnnnnnnnnnnnnnnnnnnnnnnnnnnnnnnnnnnnnnnnnnnnnnnnnnnnnnnnnnnnnnnnnnnnnnnnnnnnnnnnnnnnnnnnnnnnnnnnnnnnnnnnnnnnnnnnnnnnnnnnnnnnnnnnnnnnnnnnnnnnnnnnnnnnnnnnnnnnnnnnnnnnnnnnnnnnnnnnnnnnnnnnnnnnnnnnnnnnnnnnnnnnnnnnnnnnnnnnnnnnnnnnnnnnnnnnnnnnnnnnnnnnnnnnnnnnnnnnnnnnnnnnnnnnnnnnnnnnnnnnnnnnnnnnnnnnnnnnnnnnnnnnnnnnnnnnnnnnnnnnnnnnnnnnnnnnnnnnnnnnnnnnnnnnnnnnnnnnnnnnnnnnnnnnnnnnnnnnnnnnnnnnnnnnnnnnnnnnnnnnnnnnnnnnnnnnnnnnnnnnnnnnnnnnnnnnnnnnnnnnnnnnnnnnnnnnnnnnnnnnnnnnnnnnnnnnnnnnnnnnnnnnnnnnnnnnnnnnnnnnnnnnnnnnnnnnnnnnnnnnnnnnnnnnnnnnnnnnnnnnnnnnnnnnnnnnnnnnnnnnnnnnnnnnnnnnnnnnnnnnnnnnnnnnnnnnnnnnnnnnnnnnnnnnnnnnnnnnnnnnnnnnnnnnnnnnnnnnnnnnnnnnnnnnnnnnnnnnnnnnnnnnnnnnnnnnnnnnnnnnnnnnnnnnnnnnnnnnnnnnnnnnnnnnnnnnnnnnnnnnnnnnnnnnnnnnnnnnnnnnnnnnnnnnnnnnnnnnnnnnnnnnnnnnnnnnnnnnnnnnnnnnnnnnnnnnnnnnnnnnnnnnnnnnnnnnnnnnnnnnnnnnnnnnnnnnnnnnnnnnnnnnnnnnnnnnnnnnnnnnnnnnnnnnnnnnnnnnnnnnnnnnnnnnnnnnnnnnnnnnnnnnnnnnnnnnnnnnnnnnnnnnnnnnnnnnnnnnnnnnnnnnnnnnnnnnnnnnnnnnnnnnnnnnnnnnnnnnnnnnnnnnnnnnnnnnnnnnnnnnnnnnnnnnnnnnnnnnnnnnnnnnnnnnnnnnnnnnnnnnnnnnnnnnnnnnnnnnnnnnnnnnnnnnnnnnnnnnnnnnnnnnnnnnnnnnnnnnnnnnnnnnnnnnnnnnnnnnnnnnnnnnnnnnnnnnnnnnnnnnnnnnnnnnnnnnnnnnnnnnnnnnnnnnnnnnnnnnnnnnnnnnnnnnnnnnnnnnnnnnnnnnnnnnnnnnnnnnnnnnnnnnnnnnnnnnnnnnnnnnnnnnnnnnnnnnnnnnnnnnnnnnnnnnnnnnnnnnnnnnnnnnnnnnnnnnnnnnnnnnnnnnnnnnnnnnnnnnnnnnnnnnnnnnnnnnnnnnnnnnnnnnnnnnnnnnnnnnnnnnnnnnnnnnnnnnnnnnnnnnnnnnnnnnnnnnnnnnnnnnnnnnnnnnnnnnnnnnnnnnnnnnnnnnnnnnnnnnnnnnnnnnnnnnnnnnnnnnnnnnnnnnnnnnnnnnnnnnnnnnnnnnnnnnnnnnnnnnnnnnnnnnnnnnnnnnnnnnnnnnnnnnnnnnnnnnnnnnnnnnnnnnnnnnnnnnnnnnnnnnnnnnnnnnnnnnnnnnnnnnnnnnnnnnnnnnnnnnnnnnnnnnnnnnnnnnnnnnnnnnnnnnnnnnnnnnnnnnnnnnnnnnnnnnnnnnnnnnnnnnnnnnnnnnnnnnnnnnnnnnnnnnnnnnnnnnnnnnnnnnnnnnnnnnnnnnnnnnnnnnnnnnnnnnnnnnnnnnnnnnnnnnnnnnnnnnnnnnnnnnnnnnnnnnnnnnnnnnnnnnnnnnnnnnnnnnnnnnnnnnnnnnnnnnnnnnnnnnnnnnnnnnnnnnnnnnnnnnnnnnnnnnnnnnnnnnnnnnnnnnnnnnnnnnnnnnnnnnnnnnnnnnnnnnnnnnnnnnnnnnnnnnnnnnnnnnnnnnnnnnnnnnnnnnnnnnnnnnnnnnnnnnnnnnnnnnnnnnnnnnnnnnnnnnnnnnnnnnnnnnnnnnnnnnnnnnnnnnnnnnnnnnnnnnnnnnnnnnnnnnnnnnnnnnnnnnnnnnnnnnnnnnnnnnnnnnnnnnnnnnnnnnnnnnnnnnnnnnnnnnnnnnnnnnnnnnnnnnnnnnnnnnnnnnnnnnnnnnnnnnnnnnnnnnnnnnnnnnnnnnnnnnnnnnnnnnnnnnnnnnnnnnnnnnnnnnnnnnnnnnnnnnnnnnnnnnnnnnnnnnnnnnnnnnnnnnnnnnnnnnnnnnnnnnnnnnnnnnnnnnnnnnnnnnnnnnnnnnnnnnnnnnnnnnnnnnnnnnnnnnnnnnnnnnnnnnnnnnnnnnnnnnnnnnnnnnnnnnnnnnnnnnnnnnnnnnnnnnnnnnnnnnnnnnnnnnnnnnnnnnnnnnnnnnnnnnnnnnnnnnnnnnnnnnnnnnnnnnnnnnnnnnnnnnnnnnnnnnnnnnnnnnnnnnnnnnnnnnnnnnnnnnnnnnnnnnnnnnnnnnnnnnnnnnnnnnnnnnnnnnnnnnnnnnnnnnnnnnnnnnnnnnnnnnnnnnnnnnnnnnnnnnnnnnnnnnnnnnnnnnnnnnnnnnnnnnnnnnnnnnnnnnnnnnnnnnnnnnnnnnnnnnnnnnnnnnnnnnnnnnnnnnnnnnnnnnnnnnnnnnnnnnnnnnnnnnnnnnnnnnnnnnnnnnnnnnnnnnnnnnnnnnnnnnnnnnnnnnnnnnnnnnnnnnnnnnnnnnnnnnnnnnnnnnnnnnnnnnnnnnnnnnnnnnnnnnnnnnnnnnnnnnnnnnnnnnnnnnnnnnnnnnnnnnnnnnnnnnnnnnnnnnnnnnnnnnnnnnnnnnnnnnnnnnnnnnnnnnnnnnnnnnnnnnnnnnnnnnnnnnnnnnnnnnnnnnnnnnnnnnnnnnnnnnnnnnnnnnnnnnnnnnnnnnnnnnnnnnnnnnnnnnnnnnnnnnnnnnnnnnnnnnnnnnnnnnnnnnnnnnnnnnnnnnnnnnnnnnnnnnnnnnnnnnnnnnnnnnnnnnnnnnnnnnnnnnnnnnnnnnnnnnnnnnnnnnnnnnnnnnnnnnnnnnnnnnnnnnnnnnnnnnnnnnnnnnnnnnnnnnnnnnnnnnnnnnnnnnnnnnnnnnnnnnnnnnnnnnnnnnnnnnnnnnnnnnnnnnnnnnnnnnnnnnnnnnnnnnnnnnnnnnnnnnnnnnnnnnnnnnnnnnnnnnnnnnnnnnnnnnnnnnnnnnnnnnnnnnnnnnnnnnnnnnnnnnnnnnnnnnnnnnnnnnnnnnnnnnnnnnnnnnnnnnnnnnnnnnnnnnnnnnnnnnnnnnnnnnnnnnnnnnnnnnnnnnnnnnnnnnnnnnnnnnnnnnnnnnnnnnnnnnnnnnnnnnnnnnnnnnnnnnnnnnnnnnnnnnnnnnnnnnnnnnnnnnnnnnnnnnnnnnnnnnnnnnnnnnnnnnnnnnnnnnnnnnnnnnnnnnnnnnnnnnnnnnnnnnnnnnnnnnnnnnnnnnnnnnnnnnnnnnnnnnnnnnnnnnnnnnnnnnnnnnnnnnnnnnnnnnnnnnnnnnnnnnnnnnnnnnnnnnnnnnnnnnnnnnnnnnnnnnnnnnnnnnnnnnnnnnnnnnnnnnnnnnnnnnnnnnnnnnnnnnnnnnnnnnnnnnnnnnnnnnnnnnnnnnnnnnnnnnnnnnnnnnnnnnnnnnnnnnnnnnnnnnnnnnnnnnnnnnnnnnnnnnnnnnnnnnnnnnnnnnnnnnnnnnnnnnnnnnnnnnnnnnnnnnnnnnnnnnnnnnnnnnnnnnnnnnnnnnnnnnnnnnnnnnnnnnnnnnnnnnnnnnnnnnnnnnnnnnnnnnnnnnnnnnnnnnnnnnnnnnnnnnnnnnnnnnnnnnnnnnnnnnnnnnnnnnnnnnnnnnnnnnnnnnnnnnnnnnnnnnnnnnnnnnnnnnnnnnnnnnnnnnnnnnnnnnnnnnnnnnnnnnnnnnnnnnnnnnnnnnnnnnnnnnnnnnnnnnnnnnnnnnnnnnnnnnnnnnnnnnnnnnnnnnnnnnnnnnnnnnnnnnnnnnnnnnnnnnnnnnnnnnnnnnnnnnnnnnnnnnnnnnnnnnnnnnnnnnnnnnnnnnnnnnnnnnnnnnnnnnnnnnnnnnnnnnnnnnnnnnnnnnnnnnnnnnnnnnnnnnnnnnnnnnnnnnnnnnnnnnnnnnnnnnnnnnnnnnnnnnnnnnnnnnnnnnnnnnnnnnnnnnnnnnnnnnnnnnnnnnnnnnnnnnnnnnnnnnnnnnnnnnnnnnnnnnnnnnnnnnnnnnnnnnnnnnnnnnnnnnnnnnnnnnnnnnnnnnnnnnnnnnnnnnnnnnnnnnnnnnnnnnnnnnnnnnnnnnnnnnnnnnnnnnnnnnnnnnnnnnnnnnnnnnnnnnnnnnnnnnnnnnnnnnnnnnnnnnnnnnnnnnnnnnnnnnnnnnnnnnnnnnnnnnnnnnnnnnnnnnnnnnnnnnnnnnnnnnnnnnnnnnnnnnnnnnnnnnnnnnnnnnnnnnnnnnnnnnnnnnnnnnnnnnnnnnnnnnnnnnnnnnnnnnnnnnnnnnnnnnnnnnnnnnnnnnnnnnnnnnnnnnnnnnnnnnnnnnnnnnnnnnnnnnnnnnnnnnnnnnnnnnnnnnnnnnnnnnnnnnnnnnnnnnnnnnnnnnnnnnnnnnnnnnnnnnnnnnnnnnnnnnnnnnnnnnnnnnnnnnnnnnnnnnnnnnnnnnnnnnnnnnnnnnnnnnnnnnnnnnnnnnnnnnnnnnnnnnnnnnnnnnnnnnnnnnnnnnnnnnnnnnnnnnnnnnnnnnnnnnnnnnnnnnnnnnnnnnnnnnnnnnnnnnnnnnnnnnnnnnnnnnnnnnnnnnnnnnnnnnnnnnnnnnnnnnnnnnnnnnnnnnnnnnnnnnnnnnnnnnnnnnnnnnnnnnnnnnnnnnnnnnnnnnnnnnnnnnnnnnnnnnnnnnnnnnnnnnnnnnnnnnnnnnnnnnnnnnnnnnnnnnnnnnnnnnnnnnnnnnnnnnnnnnnnnnnnnnnnnnnnnnnnnnnnnnnnnnnnnnnnnnnnnnnnnnnnnnnnnnnnnnnnnnnnnnnnnnnnnnnnnnnnnnnnnnnnnnnnnnnnnnnnnnnnnnnnnnnnnnnnnnnnnnnnnnnnnnnnnnnnnnnnnnnnnnnnnnnnnnnnnnnnnnnnnnnnnnnnnnnnnnnnnnnnnnnnnnnnnnnnnnnnnnnnnnnnnnnnnnnnnnnnnnnnnnnnnnnnnnnnnnnnnnnnnnnnnnnnnnnnnnnnnnnnnnnnnnnnnnnnnnnnnnnnnnnnnnnnnnnnnnnnnnnnnnnnnnnnnnnnnnnnnnnnnnnnnnnnnnnnnnnnnnnnnnnnnnnnnnnnnnnnnnnnnnnnnnnnnnnnnnnnnnnnnnnnnnnnnnnnnnnnnnnnnnnnnnnnnnnnnnnnnnnnnnnnnnnnnnnnnnnnnnnnnnnnnnnnnnnnnnnnnnnnnnnnnnnnnnnnnnnnnnnnnnnnnnnnnnnnnnnnnnnnnnnnnnnnnnnnnnnnnnnnnnnnnnnnnnnnnnnnnnnnnnnnnnnnnnnnnnnnnnnnnnnnnnnnnnnnnnnnnnnnnnnnnnnnnnnnnnnnnnnnnnnnnnnnnnnnnnnnnnnnnnnnnnnnnnnnnnnnnnnnnnnnnnnnnnnnnnnnnnnnnnnnnnnnnnnnnnnnnnnnnnnnnnnnnnnnnnnnnnnnnnnnnnnnnnnnnnnnnnnnnnnnnnnnnnnnnnnnnnnnnnnnnnnnnnnnnnnnnnnnnnnnnnnnnnnnnnnnnnnnnnnnnnnnnnnnnnnnnnnnnnnnnnnnnnnnnnnnnnnnnnnnnnnnnnnnnnnnnnnnnnnnnnnnnnnnnnnnnnnnnnnnnnnnnnnnnnnnnnnnnnnnnnnnnnnnnnnnnnnnnnnnnnnnnnnnnnnnnnnnnnnnnnnnnnnnnnnnnnnnnnnnnnnnnnnnnnnnnnnnnnnnnnnnnnnnnnnnnnnnnnnnnnnnnnnnnnnnnnnnnnnnnnnnnnnnnnnnnnnnnnnnnnnnnnnnnnnnnnnnnnnnnnnnnnnnnnnnnnnnnnnnnnnnnnnnnnnnnnnnnnnnnnnnnnnnnnnnnnnnnnnnnnnnnnnnnnnnnnnnnnnnnnnnnnnnnnnnnnnnnnnnnnnnnnnnnnnnnnnnnnnnnnnnnnnnnnnnnnnnnnnnnnnnnnnnnnnnnnnnnnnnnnnnnnnnnnnnnnnnnnnnnnnnnnnnnnnnnnnnnnnnnnnnnnnnnnnnnnnnnnnnnnnnnnnnnnnnnnnnnnnnnnnnnnnnnnnnnnnnnnnnnnnnnnnnnnnnnnnnnnnnnnnnnnnnnnnnnnnnnnnnnnnnnnnnnnnnnnnnnnnnnnnnnnnnnnnnnnnnnnnnnnnnnnnnnnnnnnnnnnnnnnnnnnnnnnnnnnnnnnnnnnnnnnnnnnnnnnnnnnnnnnnnnnnnnnnnnnnnnnnnnnnnnnnnnnnnnnnnnnnnnnnnnnnnnnnnnnnnnnnnnnnnnnnnnnnnnnnnnnnnnnnnnnnnnnnnnnnnnnnnnnnnnnnnnnnnnnnnnnnnnnnnnnnnnnnnnnnnnnnnnnnnnnnnnnnnnnnnnnnnnnnnnnnnnnnnnnnnnnnnnnnnnnnnnnnnnnnnnnnnnnnnnnnnnnnnnnnnnnnnnnnnnnnnnnnnnnnnnnnnnnnnnnnnnnnnnnnnnnnnnnnnnnnnnnnnnnnnnnnnnnnnnnnnnnnnnnnnnnnnnnnnnnnnnnnnnnnnnnnnnnnnnnnnnnnnnnnnnnnnnnnnnnnnnnnnnnnnnnnnnnnnnnnnnnnnnnnnnnnnnnnnnnnnnnnnnnnnnnnnnnnnnnnnnnnnnnnnnnnnnnnnnnnnnnnnnnnnnnnnnnnnnnnnnnnnnnnnnnnnnnnnnnnnnnnnnnnnnnnnnnnnnnnnnnnnnnnnnnnnnnnnnnnnnnnnnnnnnnnnnnnnnnnnnnnnnnnnnnnnnnnnnnnnnnnnnnnnnnnnnnnnnnnnnnnnnnnnnnnnnnnnnnnnnnnnnnnnnnnnnnnnnnnnnnnnnnnnnnnnnnnnnnnnnnnnnnnnnnnnnnnnnnnnnnnnnnnnnnnnnnnnnnnnnnnnnnnnnnnnnnnnnnnnnnnnnnnnnnnnnnnnnnnnnnnnnnnnnnnnnnnnnnnnnnnnnnnnnnnnnnnnnnnnnnnnnnnnnnnnnnnnnnnnnnnnnnnnnnnnnnnnnnnnnnnnnnnnnnnnnnnnnnnnnnnnnnnnnnnnnnnnnnnnnnnnnnnnnnnnnnnnnnnnnnnnnnnnnnnnnnnnnnnnnnnnnnnnnnnnnnnnnnnnnnnnnnnnnnnnnnnnnnnnnnnnnnnnnnnnnnnnnnnnnnnnnnnnnnnnnnnnnnnnnnnnnnnnnnnnnnnnnnnnnnnnnnnnnnnnnnnnnnnnnnnnnnnnnnnnnnnnnnnnnnnnnnnnnnnnnnnnnnnnnnnnnnnnnnnnnnnnnnnnnnnnnnnnnnnnnnnnnnnnnnnnnnnnnnnnnnnnnnnnnnnnnnnnnnnnnnnnnnnnnnnnnnnnnnnnnnnnnnnnnnnnnnnnnnnnnnnnnnnnnnnnnnnnnnnnnnnnnnnnnnnnnnnnnnnnnnnnnnnnnnnnnnnnnnnnnnnnnnnnnnnnnnnnnnnnnnnnnnnnnnnnnnnnnnnnnnnnnnnnnnnnnnnnnnnnnnnnnnnnnnnnnnnnnnnnnnnnnnnnnnnnnnnnnnnnnnnnnnnnnnnnnnnnnnnnnnnnnnnnnnnnnnnnnnnnnnnnnnnnnnnnnnnnnnnnnnnnnnnnnnnnnnnnnnnnnnnnnnnnnnnnnnnnnnnnnnnnnnnnnnnnnnnnnnnnnnnnnnnnnnnnnnnnnnnnnnnnnnnnnnnnnnnnnnnnnnnnnnnnnnnnnnnnnnnnnnnnnnnnnnnnnnnnnnnnnnnnnnnnnnnnnnnnnnnnnnnnnnnnnnnnnnnnnnnnnnnnnnnnnnnnnnnnnnnnnnnnnnnnnnnnnnnnnnnnnnnnnnnnnnnnnnnnnnnnnnnnnnnnnnnnnnnnnnnnnnnnnnnnnnnnnnnnnnnnnnnnnnnnnnnnnnnnnnnnnnnnnnnnnnnnnnnnnnnnnnnnnnnnnnnnnnnnnnnnnnnnnnnnnnnnnnnnnnnnnnnnnnnnnnnnnnnnnnnnnnnnnnnnnnnnnnnnnnnnnnnnnnnnnnnnnnnnnnnnnnnnnnnnnnnnnnnnnnnnnnnnnnnnnnnnnnnnnnnnnnnnnnnnnnnnnnnnnnnnnnnnnnnnnnnnnnnnnnnnnnnnnnnnnnnnnnnnnnnnnnnnnnnnnnnnnnnnnnnnnnnnnnnnnnnnnnnnnnnnnnnnnnnnnnnnnnnnnnnnnnnnnnnnnnnnnnnnnnnnnnnnnnnnnnnnnnnnnnnnnnnnnnnnnnnnnnnnnnnnnnnnnnnnnnnnnnnnnnnnnnnnnnnnnnnnnnnnnnnnnnnnnnnnnnnnnnnnnnnnnnnnnnnnnnnnnnnnnnnnnnnnnnnnnnnnnnnnnnnnnnnnnnnnnnnnnnnnnnnnnnnnnnnnnnnnnnnnnnnnnnnnnnnnnnnnnnnnnnnnnnnnnnnnnnnnnnnnnnnnnnnnnnnnnnnnnnnnnnnnnnnnnnnnnnnnnnnnnnnnnnnnnnnnnnnnnnnnnnnnnnnnnnnnnnnnnnnnnnnnnnnnnnnnnnnnnnnnnnnnnnnnnnnnnnnnnnnnnnnnnnnnnnnnnnnnnnnnnnnnnnnnnnnnnnnnnnnnnnnnnnnnnnnnnnnnnnnnnnnnnnnnnnnnnnnnnnnnnnnnnnnnnnnnnnnnnnnnnnnnnnnnnnnnnnnnnnnnnnnnnnnnnnnnnnnnnnnnnnnnnnnnnnnnnnnnnnnnnnnnnnnnnnnnnnnnnnnnnnnnnnnnnnnnnnnnnnnnnnnnnnnnnnnnnnnnnnnnnnnnnnnnnnnnnnnnnnnnnnnnnnnnnnnnnnnnnnnnnnnnnnnnnnnnnnnnnnnnnnnnnnnnnnnnnnnnnnnnnnnnnnnnnnnnnnnnnnnnnnnnnnnnnnnnnnnnnnnnnnnnnnnnnnnnnnnnnnnnnnnnnnnnnnnnnnnnnnnnnnnnnnnnnnnnnnnnnnnnnnnnnnnnnnnnnnnnnnnnnnnnnnnnnnnnnnnnnnnnnnnnnnnnnnnnnnnnnnnnnnnnnnnnnnnnnnnnnnnnnnnnnnnnnnnnnnnnnnnnnnnnnnnnnnnnnnnnnnnnnnnnnnnnnnnnnnnnnnnnnnnnnnnnnnnnnnnnnnnnnnnnnnnnnnnnnnnnnnnnnnnnnnnnnnnnnnnnnnnnnnnnnnnnnnnnnnnnnnnnnnnnnnnnnnnnnnnnnnnnnnnnnnnnnnnnnnnnnnnnnnnnnnnnnnnnnnnnnnnnnnnnnnnnnnnnnnnnnnnnnnnnnnnnnnnnnnnnnnnnnnnnnnnnnnnnnnnnnnnnnnnnnnnnnnnnnnnnnnnnnnnnnnnnnnnnnnnnnnnnnnnnnnnnnnnnnnnnnnnnnnnnnnnnnnnnnnnnnnnnnnnnnnnnnnnnnnnnnnnnnnnnnnnnnnnnnnnnnnnnnnnnnnnnnnnnnnnnnnnnnnnnnnnnnnnnnnnnnnnnnnnnnnnnnnnnnnnnnnnnnnnnnnnnnnnnnnnnnnnnnnnnnnnnnnnnnnnnnnnnnnnnnnnnnnnnnnnnnnnnnnnnnnnnnnnnnnnnnnnnnnnnnnnnnnnnnnnnnnnnnnnnnnnnnnnnnnnnnnnnnnnnnnnnnnnnnnnnnnnnnnnnnnnnnnnnnnnnnnnnnnnnnnnnnnnnnnnnnnnnnnnnnnnnnnnnnnnnnnnnnnnnnnnnnnnnnnnnnnnnnnnnnnnnnnnnnnnnnnnnnnnnnnnnnnnnnnnnnnnnnnnnnnnnnnnnnnnnnnnnnnnnnnnnnnnnnnnnnnnnnnnnnnnnnnnnnnnnnnnnnnnnnnnnnnnnnnnnnnnnnnnnnnnnnnnnnnnnnnnnnnnnnnnnnnnnnnnnnnnnnnnnnnnnnnnnnnnnnnnnnnnnnnnnnnnnnnnnnnnnnnnnnnnnnnnnnnnnnnnnnnnnnnnnnnnnnnnnnnnnnnnnnnnnnnnnnnnnnnnnnnnnnnnnnnnnnnnnnnnnnnnnnnnnnnnnnnnnnnnnnnnnnnnnnnnnnnnnnnnnnnnnnnnnnnnnnnnnnnnnnnnnnnnnnnnnnnnnnnnnnnnnnnnnnnnnnnnnnnnnnnnnnnnnnnnnnnnnnnnnnnnnnnnnnnnnnnnnnnnnnnnnnnnnnnnnnnnnnnnnnnnnnnnnnnnnnnnnnnnnnnnnnnnnnnnnnnnnnnnnnnnnnnnnnnnnnnnnnnnnnnnnnnnnnnnnnnnnnnnnnnnnnnnnnnnnnnnnnnnnnnnnnnnnnnnnnnnnnnnnnnnnnnnnnnnnnnnnnnnnnnnnnnnnnnnnnnnnnnnnnnnnnnnnnnnnnnnnnnnnnnnnnnnnnnnnnnnnnnnnnnnnnnnnnnnnnnnnnnnnnnnnnnnnnnnnnnnnnnnnnnnnnnnnnnnnnnnnnnnnnnnnnnnnnnnnnnnnnnnnnnnnnnnnnnnnnnnnnnnnnnnnnnnnnnnnnnnnnnnnnnnnnnnnnnnnnnnnnnnnnnnnnnnnnnnnnnnnnnnnnnnnnnnnnnnnnnnnnnnnnnnnnnnnnnnnnnnnnnnnnnnnnnnnnnnnnnnnnnnnnnnnnnnnnnnnnnnnnnnnnnnnnnnnnnnnnnnnnnnnnnnnnnnnnnnnnnnnnnnnnnnnnnnnnnnnnnnnnnnnnnnnnnnnnnnnnnnnnnnnnnnnnnnnnnnnnnnnnnnnnnnnnnnnnnnnnnnnnnnnnnnnnnnnnnnnnnnnnnnnnnnnnnnnnnnnnnnnnnnnnnnnnnnnnnnnnnnnnnnnnnnnnnnnnnnnnnnnnnnnnnnnnnnnnnnnnnnnnnnnnnnnnnnnnnnnnnnnnnnnnnnnnnnnnnnnnnnnnnnnnnnnnnnnnnnnnnnnnnnnnnnnnnnnnnnnnnnnnnnnnnnnnnnnnnnnnnnnnnnnnnnnnnnnnnnnnnnnnnnnnnnnnnnnnnnnnnnnnnnnnnnnnnnnnnnnnnnnnnnnnnnnnnnnnnnnnnnnnnnnnnnnnnnnnnnnnnnnnnnnnnnnnnnnnnnnnnnnnnnnnnnnnnnnnnnnnnnnnnnnnnnnnnnnnnnnnnnnnnnnnnnnnnnnnnnnnnnnnnnnnnnnnnnnnnnnnnnnnnnnnnnnnnnnnnnnnnnnnnnnnnnnnnnnnnnnnnnnnnnnnnnnnnnnnnnnnnnnnnnnnnnnnnnnnnnnnnnnnnnnnnnnnnnnnnnnnnnnnnnnnnnnnnnnnnnnnnnnnnnnnnnnnnnnnnnnnnnnnnnnnnnnnnnnnnnnnnnnnnnnnnnnnnnnnnnnnnnnnnnnnnnnnnnnnnnnnnnnnnnnnnnnnnnnnnnnnnnnnnnnnnnnnnnnnnnnnnnnnnnnnnnnnnnnnnnnnnnnnnnnnnnnnnnnnnnnnnnnnnnnnnnnnnnnnnnnnnnnnnnnnnnnnnnnnnnnnnnnnnnnnnnnnnnnnnnnnnnnnnnnnnnnnnnnnnnnnnnnnnnnnnnnnnnnnnnnnnnnnnnnnnnnnnnnnnnnnnnnnnnnnnnnnnnnnnnnnnnnnnnnnnnnnnnnnnnnnnnnnnnnnnnnnnnnnnnnnnnnnnnnnnnnnnnnnnnnnnnnnnnnnnnnnnnnnnnnnnnnnnnnnnnnnnnnnnnnnnnnnnnnnnnnnnnnnnnnnnnnnnnnnnnnnnnnnnnnnnnnnnnnnnnnnnnnnnnnnnnnnnnnnnnnnnnnnnnnnnnnnnnnnnnnnnnnnnnnnnnnnnnnnnnnnnnnnnnnnnnnnnnnnnnnnnnnnnnnnnnnnnnnnnnnnnnnnnnnnnnnnnnnnnnnnnnnnnnnnnnnnnnnnnnnnnnnnnnnnnnnnnnnnnnnnnnnnnnnnnnnnnnnnnnnnnnnnnnnnnnnnnnnnnnnnnnnnnnnnnnnnnnnnnnnnnnnnnnnnnnnnnnnnnnnnnnnnnnnnnnnnnnnnnnnnnnnnnnnnnnnnnnnnnnnnnnnnnnnnnnnnnnnnnnnnnnnnnnnnnnnnnnnnnnnnnnnnnnnnnnnnnnnnnnnnnnnnnnnnnnnnnnnnnnnnnnnnnnnnnnnnnnnnnnnnnnnnnnnnnnnnnnnnnnnnnnnnnnnnnnnnnnnnnnnnnnnnnnnnnnnnnnnnnnnnnnnnnnnnnnnnnnnnnnnnnnnnnnnnnnnnnnnnnnnnnnnnnnnnnnnnnnnnnnnnnnnnnnnnnnnnnnnnnnnnnnnnnnnnnnnnnnnnnnnnnnnnnnnnnnnnnnnnnnnnnnnnnnnnnnnnnnnnnnnnnnnnnnnnnnnnnnnnnnnnnnnnnnnnnnnnnnnnnnnnnnnnnnnnnnnnnnnnnnnnnnnnnnnnnnnnnnnnnnnnnnnnnnnnnnnnnnnnnnnnnnnnnnnnnnnnnnnnnnnnnnnnnnnnnnnnnnnnnnnnnnnnnnnnnnnnnnnnnnnnnnnnnnnnnnnnnnnnnnnnnnnnnnnnnnnnnnnnnnnnnnnnnnnnnnnnnnnnnnnnnnnnnnnnnnnnnnnnnnnnnnnnnnnnnnnnnnnnnnnnnnnnnnnnnnnnnnnnnnnnnnnnnnnnnnnnnnnnnnnnnnnnnnnnnnnnnnnnnnnnnnnnnnnnnnnnnnnnnnnnnnnnnnnnnnnnnnnnnnnnnnnnnnnnnnnnnnnnnnnnnnnnnnnnnnnnnnnnnnnnnnnnnnnnnnnnnnnnnnnnnnnnnnnnnnnnnnnnnnnnnnnnnnnnnnnnnnnnnnnnnnnnnnnnnnnnnnnnnnnnnnnnnnnnnnnnnnnnnnnnnnnnnnnnnnnnnnnnnnnnnnnnnnnnnnnnnnnnnnnnnnnnnnnnnnnnnnnnnnnnnnnnnnnnnnnnnnnnnnnnnnnnnnnnnnnnnnnnnnnnnnnnnnnnnnnnnnnnnnnnnnnnnnnnnnnnnnnnnnnnnnnnnnnnnnnnnnnnnnnnnnnnnnnnnnnnnnnnnnnnnnnnnnnnnnnnnnnnnnnnnnnnnnnnnnnnnnnnnnnnnnnnnnnnnnnnnnnnnnnnnnnnnnnnnnnnnnnnnnnnnnnnnnnnnnnnnnnnnnnnnnnnnnnnnnnnnnnnnnnnnnnnnnnnnnnnnnnnnnnnnnnnnnnnnnnnnnnnnnnnnnnnnnnnnnnnnnnnnnnnnnnnnnnnnnnnnnnnnnnnnnnnnnnnnnnnnnnnnnnnnnnnnnnnnnnnnnnnnnnnnnnnnnnnnnnnnnnnnnnnnnnnnnnnnnnnnnnnnnnnnnnnnnnnnnnnnnnnnnnnnnnnnnnnnnnnnnnnnnnnnnnnnnnnnnnnnnnnnnnnnnnnnnnnnnnnnnnnnnnnnnnnnnnnnnnnnnnnnnnnnnnnnnnnnnnnnnnnnnnnnnnnnnnnnnnnnnnnnnnnnnnnnnnnnnnnnnnnnnnnnnnnnnnnnnnnnnnnnnnnnnnnnnnnnnnnnnnnnnnnnnnnnnnnnnnnnnnnnnnnnnnnnnnnnnnnnnnnnnnnnnnnnnnnnnnnnnnnnnnnnnnnnnnnnnnnnnnnnnnnnnnnnnnnnnnnnnnnnnnnnnnnnnnnnnnnnnnnnnnnnnnnnnnnnnnnnnnnnnnnnnnnnnnnnnnnnnnnnnnnnnnnnnnnnnnnnnnnnnnnnnnnnnnnnnnnnnnnnnnnnnnnnnnnnnnnnnnnnnnnnnnnnnnnnnnnnnnnnnnnnnnnnnnnnnnnnnnnnnnnnnnnnnnnnnnnnnnnnnnnnnnnnnnnnnnnnnnnnnnnnnnnnnnnnnnnnnnnnnnnnnnnnnnnnnnnnnnnnnnnnnnnnnnnnnnnnnnnnnnnnnnnnnnnnnnnnnnnnnnnnnnnnnnnnnnnnnnnnnnnnnnnnnnnnnnnnnnnnnnnnnnnnnnnnnnnnnnnnnnnnnnnnnnnnnnnnnnnnnnnnnnnnnnnnnnnnnnnnnnnnnnnnnnnnnnnnnnnnnnnnnnnnnnnnnnnnnnnnnnnnnnnnnnnnnnnnnnnnnnnnnnnnnnnnnnnnnnnnnnnnnnnnnnnnnnnnnnnnnnnnnnnnnnnnnnnnnnnnnnnnnnnnnnnnnnnnnnnnnnnnnnnnnnnnnnnnnnnnnnnnnnnnnnnnnnnnnnnnnnnnnnnnnnnnnnnnnnnnnnnnnnnnnnnnnnnnnnnnnnnnnnnnnnnnnnnnnnnnnnnnnnnnnnnnnnnnnnnnnnnnnnnnnnnnnnnnnnnnnnnnnnnnnnnnnnnnnnnnnnnnnnnnnnnnnnnnnnnnnnnnnnnnnnnnnnnnnnnnnnnnnnnnnnnnnnnnnnnnnnnnnnnnnnnnnnnnnnnnnnnnnnnnnnnnnnnnnnnnnnnnnnnnnnnnnnnnnnnnnnnnnnnnnnnnnnnnnnnnnnnnnnnnnnnnnnnnnnnnnnnnnnnnnnnnnnnnnnnnnnnnnnnnnnnnnnnnnnnnnnnnnnnnnnnnnnnnnnnnnnnnnnnnnnnnnnnnnnnnnnnnnnnnnnnnnnnnnnnnnnnnnnnnnnnnnnnnnnnnnnnnnnnnnnnnnnnnnnnnnnnnnnnnnnnnnnnnnnnnnnnnnnnnnnnnnnnnnnnnnnnnnnnnnnnnnnnnnnnnnnnnnnnnnnnnnnnnnnnnnnnnnnnnnnnnnnnnnnnnnnnnnnnnnnnnnnnnnnnnnnnnnnnnnnnnnnnnnnnnnnnnnnnnnnnnnnnnnnnnnnnnnnnnnnnnnnnnnnnnnnnnnnnnnnnnnnnnnnnnnnnnnnnnnnnnnnnnnnnnnnnnnnnnnnnnnnnnnnnnnnnnnnnnnnnnnnnnnnnnnnnnnnnnnnnnnnnnnnnnnnnnnnnnnnnnnnnnnnnnnnnnnnnnnnnnnnnnnnnnnnnnnnnnnnnnnnnnnnnnnnnnnnnnnnnnnnnnnnnnnnnnnnnnnnnnnnnnnnnnnnnnnnnnnnnnnnnnnnnnnnnnnnnnnnnnnnnnnnnnnnnnnnnnnnnnnnnnnnnnnnnnnnnnnnnnnnnnnnnnnnnnnnnnnnnnnnnnnnnnnnnnnnnnnnnnnnnnnnnnnnnnnnnnnnnnnnnnnnnnnnnnnnnnnnnnnnnnnnnnnnnnnnnnnnnnnnnnnnnnnnnnnnnnnnnnnnnnnnnnnnnnnnnnnnnnnnnnnnnnnnnnnnnnnnnnnnnnnnnnnnnnnnnnnnnnnnnnnnnnnnnnnnnnnnnnnnnnnnnnnnnnnnnnnnnnnnnnnnnnnnnnnnnnnnnnnnnnnnnnnnnnnnnnnnnnnnnnnnnnnnnnnnnnnnnnnnnnnnnnnnnnnnnnnnnnnnnnnnnnnnnnnnnnnnnnnnnnnnnnnnnnnnnnnnnnnnnnnnnnnnnnnnnnnnnnnnnnnnnnnnnnnnnnnnnnnnnnnnnnnnnnnnnnnnnnnnnnnnnnnnnnnnnnnnnnnnnnnnnnnnnnnnnnnnnnnnnnnnnnnnnnnnnnnnnnnnnnnnnnnnnnnnnnnnnnnnnnnnnnnnnnnnnnnnnnnnnnnnnnnnnnnnnnnnnnnnnnnnnnnnnnnnnnnnnnnnnnnnnnnnnnnnnnnnnnnnnnnnnnnnnnnnnnnnnnnnnnnnnnnnnnnnnnnnnnnnnnnnnnnnnnnnnnnnnnnnnnnnnnnnnnnnnnnnnnnnnnnnnnnnnnnnnnnnnnnnnnnnnnnnnnnnnnnnnnnnnnnnnnnnnnnnnnnnnnnnnnnnnnnnnnnnnnnnnnnnnnnnnnnnnnnnnnnnnnnnnnnnnnnnnnnnnnnnnnnnnnnnnnnnnnnnnnnnnnnnnnnnnnnnnnnnnnnnnnnnnnnnnnnnnnnnnnnnnnnnnnnnnnnnnnnnnnnnnnnnnnnnnnnnnnnnnnnnnnnnnnnnnnnnnnnnnnnnnnnnnnnnnnnnnnnnnnnnnnnnnnnnnnnnnnnnnnnnnnnnnnnnnnnnnnnnnnnnnnnnnnnnnnnnnnnnnnnnnnnnnnnnnnnnnnnnnnnnnnnnnnnnnnnnnnnnnnnnnnnnnnnnnnnnnnnnnnnnnnnnnnnnnnnnnnnnnnnnnnnnnnnnnnnnnnnnnnnnnnnnnnnnnnnnnnnnnnnnnnnnnnnnnnnnnnnnnnnnnnnnnnnnnnnnnnnnnnnnnnnnnnnnnnnnnnnnnnnnnnnnnnnnnnnnnnnnnnnnnnnnnnnnnnnnnnnnnnnnnnnnnnnnnnnnnnnnnnnnnnnnnnnnnnnnnnnnnnnnnnnnnnnnnnnnnnnnnnnnnnnnnnnnnnnnnnnnnnnnnnnnnnnnnnnnnnnnnnnnnnnnnnnnnnnnnnnnnnnnnnnnnnnnnnnnnnnnnnnnnnnnnnnnnnnnnnnnnnnnnnnnnnnnnnnnnnnnnnnnnnnnnnnnnnnnnnnnnnnnnnnnnnnnnnnnnnnnnnnnnnnnnnnnnnnnnnnnnnnnnnnnnnnnnnnnnnnnnnnnnnnnnnnnnnnnnnnnnnnnnnnnnnnnnnnnnnnnnnnnnnnnnnnnnnnnnnnnnnnnnnnnnnnnnnnnnnnnnnnnnnnnnnnnnnnnnnnnnnnnnnnnnnnnnnnnnnnnnnnnnnnnnnnnnnnnnnnnnnnnnnnnnnnnnnnnnnnnnnnnnnnnnnnnnnnnnnnnnnnnnnnnnnnnnnnnnnnnnnnnnnnnnnnnnnnnnnnnnnnnnnnnnnnnnnnnnnnnnnnnnnnnnnnnnnnnnnnnnnnnnnnnnnnnnnnnnnnnnnnnnnnnnnnnnnnnnnnnnnnnnnnnnnnnnnnnnnnnnnnnnnnnnnnnnnnnnnnnnnnnnnnnnnnnnnnnnnnnnnnnnnnnnnnnnnnnnnnnnnnnnnnnnnnnnnnnnnnnnnnnnnnnnnnnnnnnnnnnnnnnnnnnnnnnnnnnnnnnnnnnnnnnnnnnnnnnnnnnnnnnnnnnnnnnnnnnnnnnnnnnnnnnnnnnnnnnnnnnnnnnnnnnnnnnnnnnnnnnnnnnnnnnnnnnnnnnnnnnnnnnnnnnnnnnnnnnnnnnnnnnnnnnnnnnnnnnnnnnnnnnnnnnnnnnnnnnnnnnnnnnnnnnnnnnnnnnnnnnnnnnnnnnnnnnnnnnnnnnnnnnnnnnnnnnnnnnnnnnnnnnnnnnnnnnnnnnnnnnnnnnnnnnnnnnnnnnnnnnnnnnnnnnnnnnnnnnnnnnnnnnnnnnnnnnnnnnnnnnnnnnnnnnnnnnnnnnnnnnnnnnnnnnnnnnnnnnnnnnnnnnnnnnnnnnnnnnnnnnnnnnnnnnnnnnnnnnnnnnnnnnnnnnnnnnnnnnnnnnnnnnnnnnnnnnnnnnnnnnnnnnnnnnnnnnnnnnnnnnnnnnnnnnnnnnnnnnnnnnnnnnnnnnnnnnnnnnnnnnnnnnnnnnnnnnnnnnnnnnnnnnnnnnnnnnnnnnnnnnnnnnnnnnnnnnnnnnnnnnnnnnnnnnnnnnnnnnnnnnnnnnnnnnnnnnnnnnnnnnnnnnnnnnnnnnnnnnnnnnnnnnnnnnnnnnnnnnnnnnnnnnnnnnnnnnnnnnnnnnnnnnnnnnnnnnnnnnnnnnnnnnnnnnnnnnnnnnnnnnnnnnnnnnnnnnnnnnnnnnnnnnnnnnnnnnnnnnnnnnnnnnnnnnnnnnnnnnnnnnnnnnnnnnnnnnnnnnnnnnnnnnnnnnnnnnnnnnnnnnnnnnnnnnnnnnnnnnnnnnnnnnnnnnnnnnnnnnnnnnnnnnnnnnnnnnnnnnnnnnnnnnnnnnnnnnnnnnnnnnnnnnnnnnnnnnnnnnnnnnnnnnnnnnnnnnnnnnnnnnnnnnnnnnnnnnnnnnnnnnnnnnnnnnnnnnnnnnnnnnnnnnnnnnnnnnnnnnnnnnnnnnnnnnnnnnnnnnnnnnnnnnnnnnnnnnnnnnnnnnnnnnnnnnnnnnnnnnnnnnnnnnnnnnnnnnnnnnnnnnnnnnnnnnnnnnnnnnnnnnnnnnnnnnnnnnnnnnnnnnnnnnnnnnnnnnnnnnnnnnnnnnnnnnnnnnnnnnnnnnnnnnnnnnnnnnnnnnnnnnnnnnnnnnnnnnnnnnnnnnnnnnnnnnnnnnnnnnnnnnnnnnnnnnnnnnnnnnnnnnnnnnnnnnnnnnnnnnnnnnnnnnnnnnnnnnnnnnnnnnnnnnnnnnnnnnnnnnnnnnnnnnnnnnnnnnnnnnnnnnnnnnnnnnnnnnnnnnnnnnnnnnnnnnnnnnnnnnnnnnnnnnnnnnnnnnnnnnnnnnnnnnnnnnnnnnnnnnnnnnnnnnnnnnnnnnnnnnnnnnnnnnnnnnnnnnnnnnnnnnnnnnnnnnnnnnnnnnnnnnnnnnnnnnnnnnnnnnnnnnnnnnnnnnnnnnnnnnnnnnnnnnnnnnnnnnnnnnnnnnnnnnnnnnnnnnnnnnnnnnnnnnnnnnnnnnnnnnnnnnnnnnnnnnnnnnnnnnnnnnnnnnnnnnnnnnnnnnnnnnnnnnnnnnnnnnnnnnnnnnnnnnnnnnnnnnnnnnnnnnnnnnnnnnnnnnnnnnnnnnnnnnnnnnnnnnnnnnnnnnnnnnnnnnnnnnnnnnnnnnnnnnnnnnnnnnnnnnnnnnnnnnnnnnnnnnnnnnnnnnnnnnnnnnnnnnnnnnnnnnnnnnnnnnnnnnnnnnnnnnnnnnnnnnnnnnnnnnnnnnnnnnnnnnnnnnnnnnnnnnnnnnnnnnnnnnnnnnnnnnnnnnnnnnnnnnnnnnnnnnnnnnnnnnnnnnnnnnnnnnnnnnnnnnnnnnnnnnnnnnnnnnnnnnnnnnnnnnnnnnnnnnnnnnnnnnnnnnnnnnnnnnnnnnnnnnnnnnnnnnnnnnnnnnnnnnnnnnnnnnnnnnnnnnnnnnnnnnnnnnnnnnnnnnnnnnnnnnnnnnnnnnnnnnnnnnnnnnnnnnnnnnnnnnnnnnnnnnnnnnnnnnnnnnnnnnnnnnnnnnnnnnnnnnnnnnnnnnnnnnnnnnnnnnnnnnnnnnnnnnnnnnnnnnnnnnnnnnnnnnnnnnnnnnnnnnnnnnnnnnnnnnnnnnnnnnnnnnnnnnnnnnnnnnnnnnnnnnnnnnnnnnnnnnnnnnnnnnnnnnnnnnnnnnnnnnnnnnnnnnnnnnnnnnnnnnnnnnnnnnnnnnnnnnnnnnnnnnnnnnnnnnnnnnnnnnnnnnnnnnnnnnnnnnnnnnnnnnnnnnnnnnnnnnnnnnnnnnnnnnnnnnnnnnnnnnnnnnnnnnnnnnnnnnnnnnnnnnnnnnnnnnnnnnnnnnnnnnnnnnnnnnnnnnnnnnnnnnnnnnnnnnnnnnnnnnnnnnnnnnnnnnnnnnnnnnnnnnnnnnnnnnnnnnnnnnnnnnnnnnnnnnnnnnnnnnnnnnnnnnnnnnnnnnnnnnnnnnnnnnnnnnnnnnnnnnnnnnnnnnnnnnnnnnnnnnnnnnnnnnnnnnnnnnnnnnnnnnnnnnnnnnnnnnnnnnnnnnnnnnnnnnnnnnnnnnnnnnnnnnnnnnnnnnnnnnnnnnnnnnnnnnnnnnnnnnnnnnnnnnnnnnnnnnnnnnnnnnnnnnnnnnnnnnnnnnnnnnnnnnnnnnnnnnnnnnnnnnnnnnnnnnnnnnnnnnnnnnnnnnnnnnnnnnnnnnnnnnnnnnnnnnnnnnnnnnnnnnnnnnnnnnnnnnnnnnnnnnnnnnnnnnnnnnnnnnnnnnnnnnnnnnnnnnnnnnnnnnnnnnnnnnnnnnnnnnnnnnnnnnnnnnnnnnnnnnnnnnnnnnnnnnnnnnnnnnnnnnnnnnnnnnnnnnnnnnnnnnnnnnnnnnnnnnnnnnnnnnnnnnnnnnnnnnnnnnnnnnnnnnnnnnnnnnnnnnnnnnnnnnnnnnnnnnnnnnnnnnnnnnnnnnnnnnnnnnnnnnnnnnnnnnnnnnnnnnnnnnnnnnnnnnnnnnnnnnnnnnnnnnnnnnnnnnnnnnnnnnnnnnnnnnnnnnnnnnnnnnnnnnnnnnnnnnnnnnnnnnnnnnnnnnnnnnnnnnnnnnnnnnnnnnnnnnnnnnnnnnnnnnnnnnnnnnnnnnnnnnnnnnnnnnnnnnnnnnnnnnnnnnnnnnnnnnnnnnnnnnnnnnnnnnnnnnnnnnnnnnnnnnnnnnnnnnnnnnnnnnnnnnnnnnnnnnnnnnnnnnnnnnnnnnnnnnnnnnnnnnnnnnnnnnnnnnnnnnnnnnnnnnnnnnnnnnnnnnnnnnnnnnnnnnnnnnnnnnnnnnnnnnnnnnnnnnnnnnnnnnnnnnnnnnnnnnnnnnnnnnnnnnnnnnnnnnnnnnnnnnnnnnnnnnnnnnnnnnnnnnnnnnnnnnnnnnnnnnnnnnnnnnnnnnnnnnnnnnnnnnnnnnnnnnnnnnnnnnnnnnnnnnnnnnnnnnnnnnnnnnnnnnnnnnnnnnnnnnnnnnnnnnnnnnnnnnnnnnnnnnnnnnnnnnnnnnnnnnnnnnnnnnnnnnnnnnnnnnnnnnnnnnnnnnnnnnnnnnnnnnnnnnnnnnnnnnnnnnnnnnnnnnnnnnnnnnnnnnnnnnnnnnnnnnnnnnnnnnnnnnnnnnnnnnnnnnnnnnnnnnnnnnnnnnnnnnnnnnnnnnnnnnnnnnnnnnnnnnnnnnnnnnnnnnnnnnnnnnnnnnnnnnnnnnnnnnnnnnnnnnnnnnnnnnnnnnnnnnnnnnnnnnnnnnnnnnnnnnnnnnnnnnnnnnnnnnnnnnnnnnnnnnnnnnnnnnnnnnnnnnnnnnnnnnnnnnnnnnnnnnnnnnnnnnnnnnnnnnnnnnnnnnnnnnnnnnnnnnnnnnnnnnnnnnnnnnnnnnnnnnnnnnnnnnnnnnnnnnnnnnnnnnnnnnnnnnnnnnnnnnnnnnnnnnnnnnnnnnnnnnnnnnnnnnnnnnnnnnnnnnnnnnnnnnnnnnnnnnnnnnnnnnnnnnnnnnnnnnnnnnnnnnnnnnnnnnnnnnnnnnnnnnnnnnnnnnnnnnnnnnnnnnnnnnnnnnnnnnnnnnnnnnnnnnnnnnnnnnnnnnnnnnnnnnnnnnnnnnnnnnnnnnnnnnnnnnnnnnnnnnnnnnnnnnnnnnnnnnnnnnnnnnnnnnnnnnnnnnnnnnnnnnnnnnnnnnnnnnnnnnnnnnnnnnnnnnnnnnnnnnnnnnnnnnnnnnnnnnnnnnnnnnnnnnnnnnnnnnnnnnnnnnnnnnnnnnnnnnnnnnnnnnnnnnnnnnnnnnnnnnnnnnnnnnnnnnnnnnnnnnnnnnnnnnnnnnnnnnnnnnnnnnnnnnnnnnnnnnnnnnnnnnnnnnnnnnnnnnnnnnnnnnnnnnnnnnnnnnnnnnnnnnnnnnnnnnnnnnnnnnnnnnnnnnnnnnnnnnnnnnnnnnnnnnnnnnnnnnnnnnnnnnnnnnnnnnnnnnnnnnnnnnnnnnnnnnnnnnnnnnnnnnnnnnnnnnnnnnnnnnnnnnnnnnnnnnnnnnnnnnnnnnnnnnnnnnnnnnnnnnnnnnnnnnnnnnnnnnnnnnnnnnnnnnnnnnnnnnnnnnnnnnnnnnnnnnnnnnnnnnnnnnnnnnnnnnnnnnnnnnnnnnnnnnnnnnnnnnnnnnnnnnnnnnnnnnnnnnnnnnnnnnnnnnnnnnnnnnnnnnnnnnnnnnnnnnnnnnnnnnnnnnnnnnnnnnnnnnnnnnnnnnnnnnnnnnnnnnnnnnnnnnnnnnnnnnnnnnnnnnnnnnnnnnnnnnnnnnnnnnnnnnnnnnnnnnnnnnnnnnnnnnnnnnnnnnnnnnnnnnnnnnnnnnnnnnnnnnnnnnnnnnnnnnnnnnnnnnnnnnnnnnnnnnnnnnnnnnnnnnnnnnnnnnnnnnnnnnnnnnnnnnnnnnnnnnnnnnnnnnnnnnnnnnnnnnnnnnnnnnnnnnnnnnnnnnnnnnnnnnnnnnnnnnnnnnnnnnnnnnnnnnnnnnnnnnnnnnnnnnnnnnnnnnnnnnnnnnnnnnnnnnnnnnnnnnnnnnnnnnnnnnnnnnnnnnnnnnnnnnnnnnnnnnnnnnnnnnnnnnnnnnnnnnnnnnnnnnnnnnnnnnnnnnnnnnnnnnnnnnnnnnnnnnnnnnnnnnnnnnnnnnnnnnnnnnnnnnnnnnnnnnnnnnnnnnnnnnnnnnnnnnnnnnnnnnnnnnnnnnnnnnnnnnnnnnnnnnnnnnnnnnnnnnnnnnnnnnnnnnnnnnnnnnnnnnnnnnnnnnnnnnnnnnnnnnnnnnnnnnnnnnnnnnnnnnnnnnnnnnnnnnnnnnnnnnnnnnnnnnnnnnnnnnnnnnnnnnnnnnnnnnnnnnnnnnnnnnnnnnnnnnnnnnnnnnnnnnnnnnnnnnnnnnnnnnnnnnnnnnnnnnnnnnnnnnnnnnnnnnnnnnnnnnnnnnnnnnnnnnnnnnnnnnnnnnnnnnnnnnnnnnnnnnnnnnnnnnnnnnnnnnnnnnnnnnnnnnnnnnnnnnnnnnnnnnnnnnnnnnnnnnnnnnnnnnnnnnnnnnnnnnnnnnnnnnnnnnnnnnnnnnnnnnnnnnnnnnnnnnnnnnnnnnnnnnnnnnnnnnnnnnnnnnnnnnnnnnnnnnnnnnnnnnnnnnnnnnnnnnnnnnnnnnnnnnnnnnnnnnnnnnnnnnnnnnnnnnnnnnnnnnnnnnnnnnnnnnnnnnnnnnnnnnnnnnnnnnnnnnnnnnnnnnnnnnnnnnnnnnnnnnnnnnnnnnnnnnnnnnnnnnnnnnnnnnnnnnnnnnnnnnnnnnnnnnnnnnnnnnnnnnnnnnnnnnnnnnnnnnnnnnnnnnnnnnnnnnnnnnnnnnnnnnnnnnnnnnnnnnnnnnnnnnnnnnnnnnnnnnnnnnnnnnnnnnnnnnnnnnnnnnnnnnnnnnnnnnnnnnnnnnnnnnnnnnnnnnnnnnnnnnnnnnnnnnnnnnnnnnnnnnnnnnnnnnnnnnnnnnnnnnnnnnnnnnnnnnnnnnnnnnnnnnnnnnnnnnnnnnnnnnnnnnnnnnnnnnnnnnnnnnnnnnnnnnnnnnnnnnnnnnnnnnnnnnnnnnnnnnnnnnnnnnnnnnnnnnnnnnnnnnnnnnnnnnnnnnnnnnnnnnnnnnnnnnnnnnnnnnnnnnnnnnnnnnnnnnnnnnnnnnnnnnnnnnnnnnnnnnnnnnnnnnnnnnnnnnnnnnnnnnnnnnnnnnnnnnnnnnnnnnnnnnnnnnnnnnnnnnnnnnnnnnnnnnnnnnnnnnnnnnnnnnnnnnnnnnnnnnnnnnnnnnnnnnnnnnnnnnnnnnnnnnnnnnnnnnnnnnnnnnnnnnnnnnnnnnnnnnnnnnnnnnnnnnnnnnnnnnnnnnnnnnnnnnnnnnnnnnnnnnnnnnnnnnnnnnnnnnnnnnnnnnnnnnnnnnnnnnnnnnnnnnnnnnnnnnnnnnnnnnnnnnnnnnnnnnnnnnnnnnnnnnnnnnnnnnnnnnnnnnnnnnnnnnnnnnnnnnnnnnnnnnnnnnnnnnnnnnnnnnnnnnnnnnnnnnnnnnnnnnnnnnnnnnnnnnnnnnnnnnnnnnnnnnnnnnnnnnnnnnnnnnnnnnnnnnnnnnnnnnnnnnnnnnnnnnnnnnnnnnnnnnnnnnnnnnnnnnnnnnnnnnnnnnnnnnnnnnnnnnnnnnnnnnnnnnnnnnnnnnnnnnnnnnnnnnnnnnnnnnnnnnnnnnnnnnnnnnnnnnnnnnnnnnnnnnnnnnnnnnnnnnnnnnnnnnnnnnnnnnnnnnnnnnnnnnnnnnnnnnnnnnnnnnnnnnnnnnnnnnnnnnnnnnnnnnnnnnnnnnnnnnnnnnnnnnnnnnnnnnnnnnnnnnnnnnnnnnnnnnnnnnnnnnnnnnnnnnnnnnnnnnnnnnnnnnnnnnnnnnnnnnnnnnnnnnnnnnnnnnnnnnnnnnnnnnnnnnnnnnnnnnnnnnnnnnnnnnnnnnnnnnnnnnnnnnnnnnnnnnnnnnnnnnnnnnnnnnnnnnnnnnnnnnnnnnnnnnnnnnnnnnnnnnnnnnnnnnnnnnnnnnnnnnnnnnnnnnnnnnnnnnnnnnnnnnnnnnnnnnnnnnnnnnnnnnnnnnnnnnnnnnnnnnnnnnnnnnnnnnnnnnnnnnnnnnnnnnnnnnnnnnnnnnnnnnnnnnnnnnnnnnnnnnnnnnnnnnnnnnnnnnnnnnnnnnnnnnnnnnnnnnnnnnnnnnnnnnnnnnnnnnnnnnnnnnnnnnnnnnnnnnnnnnnnnnnnnnnnnnnnnnnnnnnnnnnnnnnnnnnnnnnnnnnnnnnnnnnnnnnnnnnnnnnnnnnnnnnnnnnnnnnnnnnnnnnnnnnnnnnnnnnnnnnnnnnnnnnnnnnnnnnnnnnnnnnnnnnnnnnnnnnnnnnnnnnnnnnnnnnnnnnnnnnnnnnnnnnnnnnnnnnnnnnnnnnnnnnnnnnnnnnnnnnnnnnnnnnnnnnnnnnnnnnnnnnnnnnnnnnnnnnnnnnnnnnnnnnnnnnnnnnnnnnnnnnnnnnnnnnnnnnnnnnnnnnnnnnnnnnnnnnnnnnnnnnnnnnnnnnnnnnnnnnnnnnnnnnnnnnnnnnnnnnnnnnnnnnnnnnnnnnnnnnnnnnnnnnnnnnnnnnnnnnnnnnnnnnnnnnnnnnnnnnnnnnnnnnnnnnnnnnnnnnnnnnnnnnnnnnnnnnnnnnnnnnnnnnnnnnnnnnnnnnnnnnnnnnnnnnnnnnnnnnnnnnnnnnnnnnnnnnnnnnnnnnnnnnnnnnnnnnnnnnnnnnnnnnnnnnnnnnnnnnnnnnnnnnnnnnnnnnnnnnnnnnnnnnnnnnnnnnnnnnnnnnnnnnnnnnnnnnnnnnnnnnnnnnnnnnnnnnnnnnnnnnnnnnnnnnnnnnnnnnnnnnnnnnnnnnnnnnnnnnnnnnnnnnnnnnnnnnnnnnnnnnnnnnnnnnnnnnnnnnnnnnnnnnnnnnnnnnnnnnnnnnnnnnnnnnnnnnnnnnnnnnnnnnnnnnnnnnnnnnnnnnnnnnnnnnnnnnnnnnnnnnnnnnnnnnnnnnnnnnnnnnnnnnnnnnnnnnnnnnnnnnnnnnnnnnnnnnnnnnnnnnnnnnnnnnnnnnnnnnnnnnnnnnnnnnnnnnnnnnnnnnnnnnnnnnnnnnnnnnnnnnnnnnnnnnnnnnnnnnnnnnnnnnnnnnnnnnnnnnnnnnnnnnnnnnnnnnnnnnnnnnnnnnnnnnnnnnnnnnnnnnnnnnnnnnnnnnnnnnnnnnnnnnnnnnnnnnnnnnnnnnnnnnnnnnnnnnnnnnnnnnnnnnnnnnnnnnnnnnnnnnnnnnnnnnnnnnnnnnnnnnnnnnnnnnnnnnnnnnnnnnnnnnnnnnnnnnnnnnnnnnnnnnnnnnnnnnnnnnnnnnnnnnnnnnnnnnnnnnnnnnnnnnnnnnnnnnnnnnnnnnnnnnnnnnnnnnnnnnnnnnnnnnnnnnnnnnnnnnnnnnnnnnnnnnnnnnnnnnnnnnnnnnnnnnnnnnnnnnnnnnnnnnnnnnnnnnnnnnnnnnnnnnnnnnnnnnnnnnnnnnnnnnnnnnnnnnnnnnnnnnnnnnnnnnnnnnnnnnnnnnnnnnnnnnnnnnnnnnnnnnnnnnnnnnnnnnnnnnnnnnnnnnnnnnnnnnnnnnnnnnnnnnnnnnnnnnnnnnnnnnnnnnnnnnnnnnnnnnnnnnnnnnnnnnnnnnnnnnnnnnnnnnnnnnnnnnnnnnnnnnnnnnnnnnnnnnnnnnnnnnnnnnnnnnnnnnnnnnnnnnnnnnnnnnnnnnnnnnnnnnnnnnnnnnnnnnnnnnnnnnnnnnnnnnnnnnnnnnnnnnnnnnnnnnnnnnnnnnnnnnnnnnnnnnnnnnnnnnnnnnnnnnnnnnnnnnnnnnnnnnnnnnnnnnnnnnnnnnnnnnnnnnnnnnnnnnnnnnnnnnnnnnnnnnnnnnnnnnnnnnnnnnnnnnnnnnnnnnnnnnnnnnnnnnnnnnnnnnnnnnnnnnnnnnnnnnnnnnnnnnnnnnnnnnnnnnnnnnnnnnnnnnnnnnnnnnnnnnnnnnnnnnnnnnnnnnnnnnnnnnnnnnnnnnnnnnnnnnnnnnnnnnnnnnnnnnnnnnnnnnnnnnnnnnnnnnnnnnnnnnnnnnnnnnnnnnnnnnnnnnnnnnnnnnnnnnnnnnnnnnnnnnnnnnnnnnnnnnnnnnnnnnnnnnnnnnnnnnnnnnnnnnnnnnnnnnnnnnnnnnnnnnnnnnnnnnnnnnnnnnnnnnnnnnnnnnnnnnnnnnnnnnnnnnnnnnnnnnnnnnnnnnnnnnnnnnnnnnnnnnnnnnnnnnnnnnnnnnnnnnnnnnnnnnnnnnnnnnnnnnnnnnnnnnnnnnnnnnnnnnnnnnnnnnnnnnnnnnnnnnnnnnnnnnnnnnnnnnnnnnnnnnnnnnnnnnnnnnnnnnnnnnnnnnnnnnnnnnnnnnnnnnnnnnnnnnnnnnnnnnnnnnnnnnnnnnnnnnnnnnnnnnnnnnnnnnnnnnnnnnnnnnnnnnnnnnnnnnnnnnnnnnnnnnnnnnnnnnnnnnnnnnnnnnnnnnnnnnnnnnnnnnnnnnnnnnnnnnnnnnnnnnnnnnnnnnnnnnnnnnnnnnnnnnnnnnnnnnnnnnnnnnnnnnnnnnnnnnnnnnnnnnnnnnnnnnnnnnnnnnnnnnnnnnnnnnnnnnnnnnnnnnnnnnnnnnnnnnnnnnnnnnnnnnnnnnnnnnnnnnnnnnnnnnnnnnnnnnnnnnnnnnnnnnnnnnnnnnnnnnnnnnnnnnnnnnnnnnnnnnnnnnnnnnnnnnnnnnnnnnnnnnnnnnnnnnnnnnnnnnnnnnnnnnnnnnnnnnnnnnnnnnnnnnnnnnnnnnnnnnnnnnnnnnnnnnnnnnnnnnnnnnnnnnnnnnnnnnnnnnnnnnnnnnnnnnnnnnnnnnnnnnnnnnnnnnnnnnnnnnnnnnnnnnnnnnnnnnnnnnnnnnnnnnnnnnnnnnnnnnnnnnnnnnnnnnnnnnnnnnnnnnnnnnnnnnnnnnnnnnnnnnnnnnnnnnnnnnnnnnnnnnnnnnnnnnnnnnnnnnnnnnnnnnnnnnnnnnnnnnnnnnnnnnnnnnnnnnnnnnnnnnnnnnnnnnnnnnnnnnnnnnnnnnnnnnnnnnnnnnnnnnnnnnnnnnnnnnnnnnnnnnnnnnnnnnnnnnnnnnnnnnnnnnnnnnnnnnnnnnnnnnnnnnnnnnnnnnnnnnnnnnnnnnnnnnnnnnnnnnnnnnnnnnnnnnnnnnnnnnnnnnnnnnnnnnnnnnnnnnnnnnnnnnnnnnnnnnnnnnnnnnnnnnnnnnnnnnnnnnnnnnnnnnnnnnnnnnnnnnnnnnnnnnnnnnnnnnnnnnnnnnnnnnnnnnnnnnnnnnnnnnnnnnnnnnnnnnnnnnnnnnnnnnnnnnnnnnnnnnnnnnnnnnnnnnnnnnnnnnnnnnnnnnnnnnnnnnnnnnnnnnnnnnnnnnnnnnnnnnnnnnnnnnnnnnnnnnnnnnnnnnnnnnnnnnnnnnnnnnnnnnnnnnnnnnnnnnnnnnnnnnnnnnnnnnnnnnnnnnnnnnnnnnnnnnnnnnnnnnnnnnnnnnnnnnnnnnnnnnnnnnnnnnnnnnnnnnnnnnnnnnnnnnnnnnnnnnnnnnnnnnnnnnnnnnnnnnnnnnnnnnnnnnnnnnnnnnnnnnnnnnnnnnnnnnnnnnnnnnnnnnnnnnnnnnnnnnnnnnnnnnnnnnnnnnnnnnnnnnnnnnnnnnnnnnnnnnnnnnnnnnnnnnnnnnnnnnnnnnnnnnnnnnnnnnnnnnnnnnnnnnnnnnnnnnnnnnnnnnnnnnnnnnnnnnnnnnnnnnnnnnnnnnnnnnnnnnnnnnnnnnnnnnnnnnnnnnnnnnnnnnnnnnnnnnnnnnnnnnnnnnnnnnnnnnnnnnnnnnnnnnnnnnnnnnnnnnnnnnnnnnnnnnnnnnnnnnnnnnnnnnnnnnnnnnnnnnnnnnnnnnnnnnnnnnnnnnnnnnnnnnnnnnnnnnnnnnnnnnnnnnnnnnnnnnnnnnnnnnnnnnnnnnnnnnnnnnnnnnnnnnnnnnnnnnnnnnnnnnnnnnnnnnnnnnnnnnnnnnnnnnnnnnnnnnnnnnnnnnnnnnnnnnnnnnnnnnnnnnnnnnnnnnnnnnnnnnnnnnnnnnnnnnnnnnnnnnnnnnnnnnnnnnnnnnnnnnnnnnnnnnnnnnnnnnnnnnnnnnnnnnnnnnnnnnnnnnnnnnnnnnnnnnnnnnnnnnnnnnnnnnnnnnnnnnnnnnnnnnnnnnnnnnnnnnnnnnnnnnnnnnnnnnnnnnnnnnnnnnnnnnnnnnnnnnnnnnnnnnnnnnnnnnnnnnnnnnnnnnnnnnnnnnnnnnnnnnnnnnnnnnnnnnnnnnnnnnnnnnnnnnnnnnnnnnnnnnnnnnnnnnnnnnnnnnnnnnnnnnnnnnnnnnnnnnnnnnnnnnnnnnnnnnnnnnnnnnnnnnnnnnnnnnnnnnnnnnnnnnnnnnnnnnnnnnnnnnnnnnnnnnnnnnnnnnnnnnnnnnnnnnnnnnnnnnnnnnnnnnnnnnnnnnnnnnnnnnnnnnnnnnnnnnnnnnnnnnnnnnnnnnnnnnnnnnnnnnnnnnnnnnnnnnnnnnnnnnnnnnnnnnnnnnnnnnnnnnnnnnnnnnnnnnnnnnnnnnnnnnnnnnnnnnnnnnnnnnnnnnnnnnnnnnnnnnnnnnnnnnnnnnnnnnnnnnnnnnnnnnnnnnnnnnnnnnnnnnnnnnnnnnnnnnnnnnnnnnnnnnnnnnnnnnnnnnnnnnnnnnnnnnnnnnnnnnnnnnnnnnnnnnnnnnnnnnnnnnnnnnnnnnnnnnnnnnnnnnnnnnnnnnnnnnnnnnnnnnnnnnnnnnnnnnnnnnnnnnnnnnnnnnnnnnnnnnnnnnnnnnnnnnnnnnnnnnnnnnnnnnnnnnnnnnnnnnnnnnnnnnnnnnnnnnnnnnnnnnnnnnnnnnnnnnnnnnnnnnnnnnnnnnnnnnnnnnnnnnnnnnnnnnnnnnnnnnnnnnnnnnnnnnnnnnnnnnnnnnnnnnnnnnnnnnnnnnnnnnnnnnnnnnnnnnnnnnnnnnnnnnnnnnnnnnnnnnnnnnnnnnnnnnnnnnnnnnnnnnnnnnnnnnnnnnnnnnnnnnnnnnnnnnnnnnnnnnnnnnnnnnnnnnnnnnnnnnnnnnnnnnnnnnnnnnnnnnnnnnnnnnnnnnnnnnnnnnnnnnnnnnnnnnnnnnnnnnnnnnnnnnnnnnnnnnnnnnnnnnnnnnnnnnnnnnnnnnnnnnnnnnnnnnnnnnnnnnnnnnnnnnnnnnnnnnnnnnnnnnnnnnnnnnnnnnnnnnnnnnnnnnnnnnnnnnnnnnnnnnnnnnnnnnnnnnnnnnnnnnnnnnnnnnnnnnnnnnnnnnnnnnnnnnnnnnnnnnnnnnnnnnnnnnnnnnnnnnnnnnnnnnnnnnnnnnnnnnnnnnnnnnnnnnnnnnnnnnnnnnnnnnnnnnnnnnnnnnnnnnnnnnnnnnnnnnnnnnnnnnnnnnnnnnnnnnnnnnnnnnnnnnnnnnnnnnnnnnnnnnnnnnnnnnnnnnnnnnnnnnnnnnnnnnnnnnnnnnnnnnnnnnnnnnnnnnnnnnnnnnnnnnnnnnnnnnnnnnnnnnnnnnnnnnnnnnnnnnnnnnnnnnnnnnnnnnnnnnnnnnnnnnnnnnnnnnnnnnnnnnnnnnnnnnnnnnnnnnnnnnnnnnnnnnnnnnnnnnnnnnnnnnnnnnnnnnnnnnnnnnnnnnnnnnnnnnnnnnnnnnnnnnnnnnnnnnnnnnnnnnnnnnnnnnnnnnnnnnnnnnnnnnnnnnnnnnnnnnnnnnnnnnnnnnnnnnnnnnnnnnnnnnnnnnnnnnnnnnnnnnnnnnnnnnnnnnnnnnnnnnnnnnnnnnnnnnnnnnnnnnnnnnnnnnnnnnnnnnnnnnnnnnnnnnnnnnnnnnnnnnnnnnnnnnnnnnnnnnnnnnnnnnnnnnnnnnnnnnnnnnnnnnnnnnnnnnnnnnnnnnnnnnnnnnnnnnnnnnnnnnnnnnnnnnnnnnnnnnnnnnnnnnnnnnnnnnnnnnnnnnnnnnnnnnnnnnnnnnnnnnnnnnnnnnnnnnnnnnnnnnnnnnnnnnnnnnnnnnnnnnnnnnnnnnnnnnnnnnnnnnnnnnnnnnnnnnnnnnnnnnnnnnnnnnnnnnnnnnnnnnnnnnnnnnnnnnnnnnnnnnnnnnnnnnnnnnnnnnnnnnnnnnnnnnnnnnnnnnnnnnnnnnnnnnnnnnnnnnnnnnnnnnnnnnnnnnnnnnnnnnnnnnnnnnnnnnnnnnnnnnnnnnnnnnnnnnnnnnnnnnnnnnnnnnnnnnnnnnnnnnnnnnnnnnnnnnnnnnnnnnnnnnnnnnnnnnnnnnnnnnnnnnnnnnnnnnnnnnnnnnnnnnnnnnnnnnnnnnnnnnnnnnnnnnnnnnnnnnnnnnnnnnnnnnnnnnnnnnnnnnnnnnnnnnnnnnnnnnnnnnnnnnnnnnnnnnnnnnnnnnnnnnnnnnnnnnnnnnnnnnnnnnnnnnnnnnnnnnnnnnnnnnnnnnnnnnnnnnnnnnnnnnnnnnnnnnnnnnnnnnnnnnnnnnnnnnnnnnnnnnnnnnnnnnnnnnnnnnnnnnnnnnnnnnnnnnnnnnnnnnnnnnnnnnnnnnnnnnnnnnnnnnnnnnnnnnnnnnnnnnnnnnnnnnnnnnnnnnnnnnnnnnnnnnnnnnnnnnnnnnnnnnnnnnnnnnnnnnnnnnnnnnnnnnnnnnnnnnnnnnnnnnnnnnnnnnnnnnnnnnnnnnnnnnnnnnnnnnnnnnnnnnnnnnnnnnnnnnnnnnnnnnnnnnnnnnnnnnnnnnnnnnnnnnnnnnnnnnnnnnnnnnnnnnnnnnnnnnnnnnnnnnnnnnnnnnnnnnnnnnnnnnnnnnnnnnnnnnnnnnnnnnnnnnnnnnnnnnnnnnnnnnnnnnnnnnnnnnnnnnnnnnnnnnnnnnnnnnnnnnnnnnnnnnnnnnnnnnnnnnnnnnnnnnnnnnnnnnnnnnnnnnnnnnnnnnnnnnnnnnnnnnnnnnnnnnnnnnnnnnnnnnnnnnnnnnnnnnnnnnnnnnnnnnnnnnnnnnnnnnnnnnnnnnnnnnnnnnnnnnnnnnnnnnnnnnnnnnnnnnnnnnnnnnnnnnnnnnnnnnnnnnnnnnnnnnnnnnnnnnnnnnnnnnnnnnnnnnnnnnnnnnnnnnnnnnnnnnnnnnnnnnnnnnnnnnnnnnnnnnnnnnnnnnnnnnnnnnnnnnnnnnnnnnnnnnnnnnnnnnnnnnnnnnnnnnnnnnnnnnnnnnnnnnnnnnnnnnnnnnnnnnnnnnnnnnnnnnnnnnnnnnnnnnnnnnnnnnnnnnnnnnnnnnnnnnnnnnnnnnnnnnnnnnnnnnnnnnnnnnnnnnnnnnnnnnnnnnnnnnnnnnnnnnnnnnnnnnnnnnnnnnnnnnnnnnnnnnnnnnnnnnnnnnnnnnnnnnnnnnnnnnnnnnnnnnnnnnnnnnnnnnnnnnnnnnnnnnnnnnnnnnnnnnnnnnnnnnnnnnnnnnnnnnnnnnnnnnnnnnnnnnnnnnnnnnnnnnnnnnnnnnnnnnnnnnnnnnnnnnnnnnnnnnnnnnnnnnnnnnnnnnnnnnnnnnnnnnnnnnnnnnnnnnnnnnnnnnnnnnnnnnnnnnnnnnnnnnnnnnnnnnnnnnnnnnnnnnnnnnnnnnnnnnnnnnnnnnnnnnnnnnnnnnnnnnnnnnnnnnnnnnnnnnnnnnnnnnnnnnnnnnnnnnnnnnnnnnnnnnnnnnnnnnnnnnnnnnnnnnnnnnnnnnnnnnnnnnnnnnnnnnnnnnnnnnnnnnnnnnnnnnnnnnnnnnnnnnnnnnnnnnnnnnnnnnnnnnnnnnnnnnnnnnnnnnnnnnnnnnnnnnnnnnnnnnnnnnnnnnnnnnnnnnnnnnnnnnnnnnnnnnnnnnnnnnnnnnnnnnnnnnnnnnnnnnnnnnnnnnnnnnnnnnnnnnnnnnnnnnnnnnnnnnnnnnnnnnnnnnnnnnnnnnnnnnnnnnnnnnnnnnnnnnnnnnnnnnnnnnnnnnnnnnnnnnnnnnnnnnnnnnnnnnnnnnnnnnnnnnnnnnnnnnnnnnnnnnnnnnnnnnnnnnnnnnnnnnnnnnnnnnnnnnnnnnnnnnnnnnnnnnnnnnnnnnnnnnnnnnnnnnnnnnnnnnnnnnnnnnnnnnnnnnnnnnnnnnnnnnnnnnnnnnnnnnnnnnnnnnnnnnnnnnnnnnnnnnnnnnnnnnnnnnnnnnnnnnnnnnnnnnnnnnnnnnnnnnnnnnnnnnnnnnnnnnnnnnnnnnnnnnnnnnnnnnnnnnnnnnnnnnnnnnnnnnnnnnnnnnnnnnnnnnnnnnnnnnnnnnnnnnnnnnnnnnnnnnnnnnnnnnnnnnnnnnnnnnnnnnnnnnnnnnnnnnnnnnnnnnnnnnnnnnnnnnnnnnnnnnnnnnnnnnnnnnnnnnnnnnnnnnnnnnnnnnnnnnnnnnnnnnnnnnnnnnnnnnnnnnnnnnnnnnnnnnnnnnnnnnnnnnnnnnnnnnnnnnnnnnnnnnnnnnnnnnnnnnnnnnnnnnnnnnnnnnnnnnnnnnnnnnnnnnnnnnnnnnnnnnnnnnnnnnnnnnnnnnnnnnnnnnnnnnnnnnnnnnnnnnnnnnnnnnnnnnnnnnnnnnnnnnnnnnnnnnnnnnnnnnnnnnnnnnnnnnnnnnnnnnnnnnnnnnnnnnnnnnnnnnnnnnnnnnnnnnnnnnnnnnnnnnnnnnnnnnnnnnnnnnnnnnnnnnnnnnnnnnnnnnnnnnnnnnnnnnnnnnnnnnnnnnnnnnnnnnnnnnnnnnnnnnnnnnnnnnnnnnnnnnnnnnnnnnnnnnnnnnnnnnnnnnnnnnnnnnnnnnnnnnnnnnnnnnnnnnnnnnnnnnnnnnnnnnnnnnnnnnnnnnnnnnnnnnnnnnnnnnnnnnnnnnnnnnnnnnnnnnnnnnnnnnnnnnnnnnnnnnnnnnnnnnnnnnnnnnnnnnnnnnnnnnnnnnnnnnnnnnnnnnnnnnnnnnnnnnnnnnnnnnnnnnnnnnnnnnnnnnnnnnnnnnnnnnnnnnnnnnnnnnnnnnnnnnnnnnnnnnnnnnnnnnnnnnnnnnnnnnnnnnnnnnnnnnnnnnnnnnnnnnnnnnnnnnnnnnnnnnnnnnnnnnnnnnnnnnnnnnnnnnnnnnnnnnnnnnnnnnnnnnnnnnnnnnnnnnnnnnnnnnnnnnnnnnnnnnnnnnnnnnnnnnnnnnnnnnnnnnnnnnnnnnnnnnnnnnnnnnnnnnnnnnnnnnnnnnnnnnnnnnnnnnnnnnnnnnnnnnnnnnnnnnnnnnnnnnnnnnnnnnnnnnnnnnnnnnnnnnnnnnnnnnnnnnnnnnnnnnnnnnnnnnnnnnnnnnnnnnnnnnnnnnnnnnnnnnnnnnnnnnnnnnnnnnnnnnnnnnnnnnnnnnnnnnnnnnnnnnnnnnnnnnnnnnnnnnnnnnnnnnnnnnnnnnnnnnnnnnnnnnnnnnnnnnnnnnnnnnnnnnnnnnnnnnnnnnnnnnnnnnnnnnnnnnnnnnnnnnnnnnnnnnnnnnnnnnnnnnnnnnnnnnnnnnnnnnnnnnnnnnnnnnnnnnnnnnnnnnnnnnnnnnnnnnnnnnnnnnnnnnnnnnnnnnnnnnnnnnnnnnnnnnnnnnnnnnnnnnnnnnnnnnnnnnnnnnnnnnnnnnnnnnnnnnnnnnnnnnnnnnnnnnnnnnnnnnnnnnnnnnnnnnnnnnnnnnnnnnnnnnnnnnnnnnnnnnnnnnnnnnnnnnnnnnnnnnnnnnnnnnnnnnnnnnnnnnnnnnnnnnnnnnnnnnnnnnnnnnnnnnnnnnnnnnnnnnnnnnnnnnnnnnnnnnnnnnnnnnnnnnnnnnnnnnnnnnnnnnnnnnnnnnnnnnnnnnnnnnnnnnnnnnnnnnnnnnnnnnnnnnnnnnnnnnnnnnnnnnnnnnnnnnnnnnnnnnnnnnnnnnnnnnnnnnnnnnnnnnnnnnnnnnnnnnnnnnnnnnnnnnnnnnnnnnnnnnnnnnnnnnnnnnnnnnnnnnnnnnnnnnnnnnnnnnnnnnnnnnnnnnnnnnnnnnnnnnnnnnnnnnnnnnnnnnnnnnnnnnnnnnnnnnnnnnnnnnnnnnnnnnnnnnnnnnnnnnnnnnnnnnnnnnnnnnnnnnnnnnnnnnnnnnnnnnnnnnnnnnnnnnnnnnnnnnnnnnnnnnnnnnnnnnnnnnnnnnnnnnnnnnnnnnnnnnnnnnnnnnnnnnnnnnnnnnnnnnnnnnnnnnnnnnnnnnnnnnnnnnnnnnnnnnnnnnnnnnnnnnnnnnnnnnnnnnnnnnnnnnnnnnnnnnnnnnnnnnnnnnnnnnnnnnnnnnnnnnnnnnnnnnnnnnnnnnnnnnnnnnnnnnnnnnnnnnnnnnnnnnnnnnnnnnnnnnnnnnnnnnnnnnnnnnnnnnnnnnnnnnnnnnnnnnnnnnnnnnnnnnnnnnnnnnnnnnnnnnnnnnnnnnnnnnnnnnnnnnnnnnnnnnnnnnnnnnnnnnnnnnnnnnnnnnnnnnnnnnnnnnnnnnnnnnnnnnnnnnnnnnnnnnnnnnnnnnnnnnnnnnnnnnnnnnnnnnnnnnnnnnnnnnnnnnnnnnnnnnnnnnnnnnnnnnnnnnnnnnnnnnnnnnnnnnnnnnnnnnnnnnnnnnnnnnnnnnnnnnnnnnnnnnnnnnnnnnnnnnnnnnnnnnnnnnnnnnnnnnnnnnnnnnnnnnnnnnnnnnnnnnnnnnnnnnnnnnnnnnnnnnnnnnnnnnnnnnnnnnnnnnnnnnnnnnnnnnnnnnnnnnnnnnnnnnnnnnnnnnnnnnnnnnnnnnnnnnnnnnnnnnnnnnnnnnnnnnnnnnnnnnnnnnnnnnnnnnnnnnnnnnnnnnnnnnnnnnnnnnnnnnnnnnnnnnnnnnnnnnnnnnnnnnnnnnnnnnnnnnnnnnnnnnnnnnnnnnnnnnnnnnnnnnnnnnnnnnnnnnnnnnnnnnnnnnnnnnnnnnnnnnnnnnnnnnnnnnnnnnnnnnnnnnnnnnnnnnnnnnnnnnnnnnnnnnnnnnnnnnnnnnnnnnnnnnnnnnnnnnnnnnnnnnnnnnnnnnnnnnnnnnnnnnnnnnnnnnnnnnnnnnnnnnnnnnnnnnnnnnnnnnnnnnnnnnnnnnnnnnnnnnnnnnnnnnnnnnnnnnnnnnnnnnnnnnnnnnnnnnnnnnnnnnnnnnnnnnnnnnnnnnnnnnnnnnnnnnnnnnnnnnnnnnnnnnnnnnnnnnnnnnnnnnnnnnnnnnnnnnnnnnnnnnnnnnnnnnnnnnnnnnnnnnnnnnnnnnnnnnnnnnnnnnnnnnnnnnnnnnnnnnnnnnnnnnnnnnnnnnnnnnnnnnnnnnnnnnnnnnnnnnnnnnnnnnnnnnnnnnnnnnnnnnnnnnnnnnnnnnnnnnnnnnnnnnnnnnnnnnnnnnnnnnnnnnnnnnnnnnnnnnnnnnnnnnnnnnnnnnnnnnnnnnnnnnnnnnnnnnnnnnnnnnnnnnnnnnnnnnnnnnnnnnnnnnnnnnnnnnnnnnnnnnnnnnnnnnnnnnnnnnnnnnnnnnnnnnnnnnnnnnnnnnnnnnnnnnnnnnnnnnnnnnnnnnnnnnnnnnnnnnnnnnnnnnnnnnnnnnnnnnnnnnnnnnnnnnnnnnnnnnnnnnnnnnnnnnnnnnnnnnnnnnnnnnnnnnnnnnnnnnnnnnnnnnnnnnnnnnnnnnnnnnnnnnnnnnnnnnnnnnnnnnnnnnnnnnnnnnnnnnnnnnnnnnnnnnnnnnnnnnnnnnnnnnnnnnnnnnnnnnnnnnnnnnnnnnnnnnnnnnnnnnnnnnnnnnnnnnnnnnnnnnnnnnnnnnnnnnnnnnnnnnnnnnnnnnnnnnnnnnnnnnnnnnnnnnnnnnnnnnnnnnnnnnnnnnnnnnnnnnnnnnnnnnnnnnnnnnnnnnnnnnnnnnnnnnnnnnnnnnnnnnnnnnnnnnnnnnnnnnnnnnnnnnnnnnnnnnnnnnnnnnnnnnnnnnnnnnnnnnnnnnnnnnnnnnnnnnnnnnnnnnnnnnnnnnnnnnnnnnnnnnnnnnnnnnnnnnnnnnnnnnnnnnnnnnnnnnnnnnnnnnnnnnnnnnnnnnnnnnnnnnnnnnnnnnnnnnnnnnnnnnnnnnnnnnnnnnnnnnnnnnnnnnnnnnnnnnnnnnnnnnnnnnnnnnnnnnnnnnnnnnnnnnnnnnnnnnnnnnnnnnnnnnnnnnnnnnnnnnnnnnnnnnnnnnnnnnnnnnnnnnnnnnnnnnnnnnnnnnnnnnnnnnnnnnnnnnnnnnnnnnnnnnnnnnnnnnnnnnnnnnnnnnnnnnnnnnnnnnnnnnnnnnnnnnnnnnnnnnnnnnnnnnnnnnnnnnnnnnnnnnnnnnnnnnnnnnnnnnnnnnnnnnnnnnnnnnnnnnnnnnnnnnnnnnnnnnnnnnnnnnnnnnnnnnnnnnnnnnnnnnnnnnnnnnnnnnnnnnnnnnnnnnnnnnnnnnnnnnnnnnnnnnnnnnnnnnnnnnnnnnnnnnnnnnnnnnnnnnnnnnnnnnnnnnnnnnnnnnnnnnnnnnnnnnnnnnnnnnnnnnnnnnnnnnnnnnnnnnnnnnnnnnnnnnnnnnnnnnnnnnnnnnnnnnnnnnnnnnnnnnnnnnnnnnnnnnnnnnnnnnnnnnnnnnnnnnnnnnnnnnnnnnnnnnnnnnnnnnnnnnnnnnnnnnnnnnnnnnnnnnnnnnnnnnnnnnnnnnnnnnnnnnnnnnnnnnnnnnnnnnnnnnnnnnnnnnnnnnnnnnnnnnnnnnnnnnnnnnnnnnnnnnnnnnnnnnnnnnnnnnnnnnnnnnnnnnnnnnnnnnnnnnnnnnnnnnnnnnnnnnnnnnnnnnnnnnnnnnnnnnnnnnnnnnnnnnnnnnnnnnnnnnnnnnnnnnnnnnnnnnnnnnnnnnnnnnnnnnnnnnnnnnnnnnnnnnnnnnnnnnnnnnnnnnnnnnnnnnnnnnnnnnnnnnnnnnnnnnnnnnnnnnnnnnnnnnnnnnnnnnnnnnnnnnnnnnnnnnnnnnnnnnnnnnnnnnnnnnnnnnnnnnnnnnnnnnnnnnnnnnnnnnnnnnnnnnnnnnnnnnnnnnnnnnnnnnnnnnnnnnnnnnnnnnnnnnnnnnnnnnnnnnnnnnnnnnnnnnnnnnnnnnnnnnnnnnnnnnnnnnnnnnnnnnnnnnnnnnnnnnnnnnnnnnnnnnnnnnnnnnnnnnnnnnnnnnnnnnnnnnnnnnnnnnnnnnnnnnnnnnnnnnnnnnnnnnnnnnnnnnnnnnnnnnnnnnnnnnnnnnnnnnnnnnnnnnnnnnnnnnnnnnnnnnnnnnnnnnnnnnnnnnnnnnnnnnnnnnnnnnnnnnnnnnnnnnnnnnnnnnnnnnnnnnnnnnnnnnnnnnnnnnnnnnnnnnnnnnnnnnnnnnnnnnnnnnnnnnnnnnnnnnnnnnnnnnnnnnnnnnnnnnnnnnnnnnnnnnnnnnnnnnnnnnnnnnnnnnnnnnnnnnnnnnnnnnnnnnnnnnnnnnnnnnnnnnnnnnnnnnnnnnnnnnnnnnnnnnnnnnnnnnnnnnnnnnnnnnnnnnnnnnnnnnnnnnnnnnnnnnnnnnnnnnnnnnnnnnnnnnnnnnnnnnnnnnnnnnnnnnnnnnnnnnnnnnnnnnnnnnnnnnnnnnnnnnnnnnnnnnnnnnnnnnnnnnnnnnnnnnnnnnnnnnnnnnnnnnnnnnnnnnnnnnnnnnnnnnnnnnnnnnnnnnnnnnnnnnnnnnnnnnnnnnnnnnnnnnnnnnnnnnnnnnnnnnnnnnnnnnnnnnnnnnnnnnnnnnnnnnnnnnnnnnnnnnnnnnnnnnnnnnnnnnnnnnnnnnnnnnnnnnnnnnnnnnnnnnnnnnnnnnnnnnnnnnnnnnnnnnnnnnnnnnnnnnnnnnnnnnnnnnnnnnnnnnnnnnnnnnnnnnnnnnnnnnnnnnnnnnnnnnnnnnnnnnnnnnnnnnnnnnnnnnnnnnnnnnnnnnnnnnnnnnnnnnnnnnnnnnnnnnnnnnnnnnnnnnnnnnnnnnnnnnnnnnnnnnnnnnnnnnnnnnnnnnnnnnnnnnnnnnnnnnnnnnnnnnnnnnnnnnnnnnnnnnnnnnnnnnnnnnnnnnnnnnnnnnnnnnnnnnnnnnnnnnnnnnnnnnnnnnnnnnnnnnnnnnnnnnnnnnnnnnnnnnnnnnnnnnnnnnnnnnnnnnnnnnnnnnnnnnnnnnnnnnnnnnnnnnnnnnnnnnnnnnnnnnnnnnnnnnnnnnnnnnnnnnnnnnnnnnnnnnnnnnnnnnnnnnnnnnnnnnnnnnnnnnnnnnnnnnnnnnnnnnnnnnnnnnnnnnnnnnnnnnnnnnnnnnnnnnnnnnnnnnnnnnnnnnnnnnnnnnnnnnnnnnnnnnnnnnnnnnnnnnnnnnnnnnnnnnnnnnnnnnnnnnnnnnnnnnnnnnnnnnnnnnnnnnnnnnnnnnnnnnnnnnnnnnnnnnnnnnnnnnnnnnnnnnnnnnnnnnnnnnnnnnnnnnnnnnnnnnnnnnnnnnnnnnnnnnnnnnnnnnnnnnnnnnnnnnnnnnnnnnnnnnnnnnnnnnnnnnnnnnnnnnnnnnnnnnnnnnnnnnnnnnnnnnnnnnnnnnnnnnnnnnnnnnnnnnnnnnnnnnnnnnnnnnnnnnnnnnnnnnnnnnnnnnnnnnnnnnnnnnnnnnnnnnnnnnnnnnnnnnnnnnnnnnnnnnnnnnnnnnnnnnnnnnnnnnnnnnnnnnnnnnnnnnnnnnnnnnnnnnnnnnnnnnnnnnnnnnnnnnnnnnnnnnnnnnnnnnnnnnnnnnnnnnnnnnnnnnnnnnnnnnnnnnnnnnnnnnnnnnnnnnnnnnnnnnnnnnnnnnnnnnnnnnnnnnnnnnnnnnnnnnnnnnnnnnnnnnnnnnnnnnnnnnnnnnnnnnnnnnnnnnnnnnnnnnnnnnnnnnnnnnnnnnnnnnnnnnnnnnnnnnnnnnnnnnnnnnnnnnnnnnnnnnnnnnnnnnnnnnnnnnnnnnnnnnnnnnnnnnnnnnnnnnnnnnnnnnnnnnnnnnnnnnnnnnnnnnnnnnnnnnnnnnnnnnnnnnnnnnnnnnnnnnnnnnnnnnnnnnnnnnnnnnnnnnnnnnnnnnnnnnnnnnnnnnnnnnnnnnnnnnnnnnnnnnnnnnnnnnnnnnnnnnnnnnnnnnnnnnnnnnnnnnnnnnnnnnnnnnnnnnnnnnnnnnnnnnnnnnnnnnnnnnnnnnnnnnnnnnnnnnnnnnnnnnnnnnnnnnnnnnnnnnnnnnnnnnnnnnnnnnnnnnnnnnnnnnnnnnnnnnnnnnnnnnnnnnnnnnnnnnnnnnnnnnnnnnnnnnnnnnnnnnnnnnnnnnnnnnnnnnnnnnnnnnnnnnnnnnnnnnnnnnnnnnnnnnnnnnnnnnnnnnnnnnnnnnnnnnnnnnnnnnnnnnnnnnnnnnnnnnnnnnnnnnnnnnnnnnnnnnnnnnnnnnnnnnnnnnnnnnnnnnnnnnnnnnnnnnnnnnnnnnnnnnnnnnnnnnnnnnnnnnnnnnnnnnnnnnnnnnnnnnnnnnnnnnnnnnnnnnnnnnnnnnnnnnnnnnnnnnnnnnnnnnnnnnnnnnnnnnnnnnnnnnnnnnnnnnnnnnnnnnnnnnnnnnnnnnnnnnnnnnnnnnnnnnnnnnnnnnnnnnnnnnnnnnnnnnnnnnnnnnnnnnnnnnnnnnnnnnnnnnnnnnnnnnnnnnnnnnnnnnnnnnnnnnnnnnnnnnnnnnnnnnnnnnnnnnnnnnnnnnnnnnnnnnnnnnnnnnnnnnnnnnnnnnnnnnnnnnnnnnnnnnnnnnnnnnnnnnnnnnnnnnnnnnnnnnnnnnnnnnnnnnnnnnnnnnnnnnnnnnnnnnnnnnnnnnnnnnnnnnnnnnnnnnnnnnnnnnnnnnnnnnnnnnnnnnnnnnnnnnnnnnnnnnnnnnnnnnnnnnnnnnnnnnnnnnnnnnnnnnnnnnnnnnnnnnnnnnnnnnnnnnnnnnnnnnnnnnnnnnnnnnnnnnnnnnnnnnnnnnnnnnnnnnnnnnnnnnnnnnnnnnnnnnnnnnnnnnnnnnnnnnnnnnnnnnnnnnnnnnnnnnnnnnnnnnnnnnnnnnnnnnnnnnnnnnnnnnnnnnnnnnnnnnnnnnnnnnnnnnnnnnnnnnnnnnnnnnnnnnnnnnnnnnnnnnnnnnnnnnnnnnnnnnnnnnnnnnnnnnnnnnnnnnnnnnnnnnnnnnnnnnnnnnnnnnnnnnnnnnnnnnnnnnnnnnnnnnnnnnnnnnnnnnnnnnnnnnnnnnnnnnnnnnnnnnnnnnnnnnnnnnnnnnnnnnnnnnnnnnnnnnnnnnnnnnnnnnnnnnnnnnnnnnnnnnnnnnnnnnnnnnnnnnnnnnnnnnnnnnnnnnnnnnnnnnnnnnnnnnnnnnnnnnnnnnnnnnnnnnnnnnnnnnnnnnnnnnnnnnnnnnnnnnnnnnnnnnnnnnnnnnnnnnnnnnnnnnnnnnnnnnnnnnnnnnnnnnnnnnnnnnnnnnnnnnnnnnnnnnnnnnnnnnnnnnnnnnnnnnnnnnnnnnnnnnnnnnnnnnnnnnnnnnnnnnnnnnnnnnnnnnnnnnnnnnnnnnnnnnnnnnnnnnnnnnnnnnnnnnnnnnnnnnnnnnnnnnnnnnnnnnnnnnnnnnnnnnnnnnnnnnnnnnnnnnnnnnnnnnnnnnnnnnnnnnnnnnnnnnnnnnnnnnnnnnnnnnnnnnnnnnnnnnnnnnnnnnnnnnnnnnnnnnnnnnnnnnnnnnnnnnnnnnnnnnnnnnnnnnnnnnnnnnnnnnnnnnnnnnnnnnnnnnnnnnnnnnnnnnnnnnnnnnnnnnnnnnnnnnnnnnnnnnnnnnnnnnnnnnnnnnnnnnnnnnnnnnnnnnnnnnnnnnnnnnnnnnnnnnnnnnnnnnnnnnnnnnnnnnnnnnnnnnnnnnnnnnnnnnnnnnnnnnnnnnnnnnnnnnnnnnnnnnnnnnnnnnnnnnnnnnnnnnnnnnnnnnnnnnnnnnnnnnnnnnnnnnnnnnnnnnnnnnnnnnnnnnnnnnnnnnnnnnnnnnnnnnnnnnnnnnnnnnnnnnnnnnnnnnnnnnnnnnnnnnnnnnnnnnnnnnnnnnnnnnnnnnnnnnnnnnnnnnnnnnnnnnnnnnnnnnnnnnnnnnnnnnnnnnnnnnnnnnnnnnnnnnnnnnnnnnnnnnnnnnnnnnnnnnnnnnnnnnnnnnnnnnnnnnnnnnnnnnnnnnnnnnnnnnnnnnnnnnnnnnnnnnnnnnnnnnnnnnnnnnnnnnnnnnnnnnnnnnnnnnnnnnnnnnnnnnnnnnnnnnnnnnnnnnnnnnnnnnnnnnnnnnnnnnnnnnnnnnnnnnnnnnnnnnnnnnnnnnnnnnnnnnnnnnnnnnnnnnnnnnnnnnnnnnnnnnnnnnnnnnnnnnnnnnnnnnnnnnnnnnnnnnnnnnnnnnnnnnnnnnnnnnnnnnnnnnnnnnnnnnnnnnnnnnnnnnnnnnnnnnnnnnnnnnnnnnnnnnnnnnnnnnnnnnnnnnnnnnnnnnnnnnnnnnnnnnnnnnnnnnnnnnnnnnnnnnnnnnnnnnnnnnnnnnnnnnnnnnnnnnnnnnnnnnnnnnnnnnnnnnnnnnnnnnnnnnnnnnnnnnnnnnnnnnnnnnnnnnnnnnnnnnnnnnnnnnnnnnnnnnnnnnnnnnnnnnnnnnnnnnnnnnnnnnnnnnnnnnnnnnnnnnnnnnnnnnnnnnnnnnnnnnnnnnnnnnnnnnnnnnnnnnnnnnnnnnnnnnnnnnnnnnnnnnnnnnnnnnnnnnnnnnnnnnnnnnnnnnnnnnnnnnnnnnnnnnnnnnnnnnnnnnnnnnnnnnnnnnnnnnnnnnnnnnnnnnnnnnnnnnnnnnnnnnnnnnnnnnnnnnnnnnnnnnnnnnnnnnnnnnnnnnnnnnnnnnnnnnnnnnnnnnnnnnnnnnnnnnnnnnnnnnnnnnnnnnnnnnnnnnnnnnnnnnnnnnnnnnnnnnnnnnnnnnnnnnnnnnnnnnnnnnnnnnnnnnnnnnnnnnnnnnnnnnnnnnnnnnnnnnnnnnnnnnnnnnnnnnnnnnnnnnnnnnnnnnnnnnnnnnnnnnnnnnnnnnnnnnnnnnnnnnnnnnnnnnnnnnnnnnnnnnnnnnnnnnnnnnnnnnnnnnnnnnnnnnnnnnnnnnnnnnnnnnnnnnnnnnnnnnnnnnnnnnnnnnnnnnnnnnnnnnnnnnnnnnnnnnnnnnnnnnnnnnnnnnnnnnnnnnnnnnnnnnnnnnnnnnnnnnnnnnnnnnnnnnnnnnnnnnnnnnnnnnnnnnnnnnnnnnnnnnnnnnnnnnnnnnnnnnnnnnnnnnnnnnnnnnnnnnnnnnnnnnnnnnnnnnnnnnnnnnnnnnnnnnnnnnnnnnnnnnnnnnnnnnnnnnnnnnnnnnnnnnnnnnnnnnnnnnnnnnnnnnnnnnnnnnnnnnnnnnnnnnnnnnnnnnnnnnnnnnnnnnnnnnnnnnnnnnnnnnnnnnnnnnnnnnnnnnnnnnnnnnnnnnnnnnnnnnnnnnnnnnnnnnnnnnnnnnnnnnnnnnnnnnnnnnnnnnnnnnnnnnnnnnnnnnnnnnnnnnnnnnnnnnnnnnnnnnnnnnnnnnnnnnnnnnnnnnnnnnnnnnnnnnnnnnnnnnnnnnnnnnnnnnnnnnnnnnnnnnnnnnnnnnnnnnnnnnnnnnnnnnnnnnnnnnnnnnnnnnnnnnnnnnnnnnnnnnnnnnnnnnnnnnnnnnnnnnnnnnnnnnnnnnnnnnnnnnnnnnnnnnnnnnnnnnnnnnnnnnnnnnnnnnnnnnnnnnnnnnnnnnnnnnnnnnnnnnnnnnnnnnnnnnnnnnnnnnnnnnnnnnnnnnnnnnnnnnnnnnnnnnnnnnnnnnnnnnnnnnnnnnnnnnnnnnnnnnnnnnnnnnnnnnnnnnnnnnnnnnnnnnnnnnnnnnnnnnnnnnnnnnnnnnnnnnnnnnnnnnnnnnnnnnnnnnnnnnnnnnnnnnnnnnnnnnnnnnnnnnnnnnnnnnnnnnnnnnnnnnnnnnnnnnnnnnnnnnnnnnnnnnnnnnnnnnnnnnnnnnnnnnnnnnnnnnnnnnnnnnnnnnnnnnnnnnnnnnnnnnnnnnnnnnnnnnnnnnnnnnnnnnnnnnnnnnnnnnnnnnnnnnnnnnnnnnnnnnnnnnnnnnnnnnnnnnnnnnnnnnnnnnnnnnnnnnnnnnnnnnnnnnnnnnnnnnnnnnnnnnnnnnnnnnnnnnnnnnnnnnnnnnnnnnnnnnnnnnnnnnnnnnnnnnnnnnnnnnnnnnnnnnnnnnnnnnnnnnnnnnnnnnnnnnnnnnnnnnnnnnnnnnnnnnnnnnnnnnnnnnnnnnnnnnnnnnnnnnnnnnnnnnnnnnnnnnnnnnnnnnnnnnnnnnnnnnnnnnnnnnnnnnnnnnnnnnnnnnnnnnnnnnnnnnnnnnnnnnnnnnnnnnnnnnnnnnnnnnnnnnnnnnnnnnnnnnnnnnnnnnnnnnnnnnnnnnnnnnnnnnnnnnnnnnnnnnnnnnnnnnnnnnnnnnnnnnnnnnnnnnnnnnnnnnnnnnnnnnnnnnnnnnnnnnnnnnnnnnnnnnnnnnnnnnnnnnnnnnnnnnnnnnnnnnnnnnnnnnnnnnnnnnnnnnnnnnnnnnnnnnnnnnnnnnnnnnnnnnnnnnnnnnnnnnnnnnnnnnnnnnnnnnnnnnnnnnnnnnnnnnnnnnnnnnnnnnnnnnnnnnnnnnnnnnnnnnnnnnnnnnnnnnnnnnnnnnnnnnnnnnnnnnnnnnnnnnnnnnnnnnnnnnnnnnnnnnnnnnnnnnnnnnnnnnnnnnnnnnnnnnnnnnnnnnnnnnnnnnnnnnnnnnnnnnnnnnnnnnnnnnnnnnnnnnnnnnnnnnnnnnnnnnnnnnnnnnnnnnnnnnnnnnnnnnnnnnnnnnnnnnnnnnnnnnnnnnnnnnnnnnnnnnnnnnnnnnnnnnnnnnnnnnnnnnnnnnnnnnnnnnnnnnnnnnnnnnnnnnnnnnnnnnnnnnnnnnnnnnnnnnnnnnnnnnnnnnnnnnnnnnnnnnnnnnnnnnnnnnnnnnnnnnnnnnnnnnnnnnnnnnnnnnnnnnnnnnnnnnnnnnnnnnnnnnnnnnnnnnnnnnnnnnnnnnnnnnnnnnnnnnnnnnnnnnnnnnnnnnnnnnnnnnnnnnnnnnnnnnnnnnnnnnnnnnnnnnnnnnnnnnnnnnnnnnnnnnnnnnnnnnnnnnnnnnnnnnnnnnnnnnnnnnnnnnnnnnnnnnnnnnnnnnnnnnnnnnnnnnnnnnnnnnnnnnnnnnnnnnnnnnnnnnnnnnnnnnnnnnnnnnnnnnnnnnnnnnnnnnnnnnnnnnnnnnnnnnnnnnnnnnnnnnnnnnnnnnnnnnnnnnnnnnnnnnnnnnnnnnnnnnnnnnnnnnnnnnnnnnnnnnnnnnnnnnnnnnnnnnnnnnnnnnnnnnnnnnnnnnnnnnnnnnnnnnnnnnnnnnnnnnnnnnnnnnnnnnnnnnnnnnnnnnnnnnnnnnnnnnnnnnnnnnnnnnnnnnnnnnnnnnnnnnnnnnnnnnnnnnnnnnnnnnnnnnnnnnnnnnnnnnnnnnnnnnnnnnnnnnnnnnnnnnnnnnnnnnnnnnnnnnnnnnnnnnnnnnnnnnnnnnnnnnnnnnnnnnnnnnnnnnnnnnnnnnnnnnnnnnnnnnnnnnnnnnnnnnnnnnnnnnnnnnnnnnnnnnnnnnnnnnnnnnnnnnnnnnnnnnnnnnnnnnnnnnnnnnnnnnnnnnnnnnnnnnnnnnnnnnnnnnnnnnnnnnnnnnnnnnnnnnnnnnnnnnnnnnnnnnnnnnnnnnnnnnnnnnnnnnnnnnnnnnnnnnnnnnnnnnnnnnnnnnnnnnnnnnnnnnnnnnnnnnnnnnnnnnnnnnnnnnnnnnnnnnnnnnnnnnnnnnnnnnnnnnnnnnnnnnnnnnnnnnnnnnnnnnnnnnnnnnnnnnnnnnnnnnnnnnnnnnnnnnnnnnnnnnnnnnnnnnnnnnnnnnnnnnnnnnnnnnnnnnnnnnnnnnnnnnnnnnnnnnnnnnnnnnnnnnnnnnnnnnnnnnnnnnnnnnnnnnnnnnnnnnnnnnnnnnnnnnnnnnnnnnnnnnnnnnnnnnnnnnnnnnnnnnnnnnnnnnnnnnnnnnnnnnnnnnnnnnnnnnnnnnnnnnnnnnnnnnnnnnnnnnnnnnnnnnnnnnnnnnnnnnnnnnnnnnnnnnnnnnnnnnnnnnnnnnnnnnnnnnnnnnnnnnnnnnnnnnnnnnnnnnnnnnnnnnnnnnnnnnnnnnnnnnnnnnnnnnnnnnnnnnnnnnnnnnnnnnnnnnnnnnnnnnnnnnnnnnnnnnnnnnnnnnnnnnnnnnnnnnnnnnnnnnnnnnnnnnnnnnnnnnnnnnnnnnnnnnnnnnnnnnnnnnnnnnnnnnnnnnnnnnnnnnnnnnnnnnnnnnnnnnnnnnnnnnnnnnnnnnnnnnnnnnnnnnnnnnnnnnnnnnnnnnnnnnnnnnnnnnnnnnnnnnnnnnnnnnnnnnnnnnnnnnnnnnnnnnnnnnnnnnnnnnnnnnnnnnnnnnnnnnnnnnnnnnnnnnnnnnnnnnnnnnnnnnnnnnnnnnnnnnnnnnnnnnnnnnnnnnnnnnnnnnnnnnnnnnnnnnnnnnnnnnnnnnnnnnnnnnnnnnnnnnnnnnnnnnnnnnnnnnnnnnnnnnnnnnnnnnnnnnnnnnnnnnnnnnnnnnnnnnnnnnnnnnnnnnnnnnnnnnnnnnnnnnnnnnnnnnnnnnnnnnnnnnnnnnnnnnnnnnnnnnnnnnnnnnnnnnnnnnnnnnnnnnnnnnnnnnnnnnnnnnnnnnnnnnnnnnnnnnnnnnnnnnnnnnnnnnnnnnnnnnnnnnnnnnnnnnnnnnnnnnnnnnnnnnnnnnnnnnnnnnnnnnnnnnnnnnnnnnnnnnnnnnnnnnnnnnnnnnnnnnnnnnnnnnnnnnnnnnnnnnnnnnnnnnnnnnnnnnnnnnnnnnnnnnnnnnnnnnnnnnnnnnnnnnnnnnnnnnnnnnnnnnnnnnnnnnnnnnnnnnnnnnnnnnnnnnnnnnnnnnnnnnnnnnnnnnnnnnnnnnnnnnnnnnnnnnnnnnnnnnnnnnnnnnnnnnnnnnnnnnnnnnnnnnnnnnnnnnnnnnnnnnnnnnnnnnnnnnnnnnnnnnnnnnnnnnnnnnnnnnnnnnnnnnnnnnnnnnnnnnnnnnnnnnnnnnnnnnnnnnnnnnnnnnnnnnnnnnnnnnnnnnnnnnnnnnnnnnnnnnnnnnnnnnnnnnnnnnnnnnnnnnnnnnnnnnnnnnnnnnnnnnnnnnnnnnnnnnnnnnnnnnnnnnnnnnnnnnnnnnnnnnnnnnnnnnnnnnnnnnnnnnnnnnnnnnnnnnnnnnnnnnnnnnnnnnnnnnnnnnnnnnnnnnnnnnnnnnnnnnnnnnnnnnnnnnnnnnnnnnnnnnnnnnnnnnnnnnnnnnnnnnnnnnnnnnnnnnnnnnnnnnnnnnnnnnnnnnnnnnnnnnnnnnnnnnnnnnnnnnnnnnnnnnnnnnnnnnnnnnnnnnnnnnnnnnnnnnnnnnnnnnnnnnnnnnnnnnnnnnnnnnnnnnnnnnnnnnnnnnnnnnnnnnnnnnnnnnnnnnnnnnnnnnnnnnnnnnnnnnnnnnnnnnnnnnnnnnnnnnnnnnnnnnnnnnnnnnnnnnnnnnnnnnnnnnnnnnnnnnnnnnnnnnnnnnnnnnnnnnnnnnnnnnnnnnnnnnnnnnnnnnnnnnnnnnnnnnnnnnnnnnnnnnnnnnnnnnnnnnnnnnnnnnnnnnnnnnnnnnnnnnnnnnnnnnnnnnnnnnnnnnnnnnnnnnnnnnnnnnnnnnnnnnnnnnnnnnnnnnnnnnnnnnnnnnnnnnnnnnnnnnnnnnnnnnnnnnnnnnnnnnnnnnnnnnnnnnnnnnnnnnnnnnnnnnnnnnnnnnnnnnnnnnnnnnnnnnnnnnnnnnnnnnnnnnnnnnnnnnnnnnnnnnnnnnnnnnnnnnnnnnnnnnnnnnnnnnnnnnnnnnnnnnnnnnnnnnnnnnnnnnnnnnnnnnnnnnnnnnnnnnnnnnnnnnnnnnnnnnnnnnnnnnnnnnnnnnnnnnnnnnnnnnnnnnnnnnnnnnnnnnnnnnnnnnnnnnnnnnnnnnnnnnnnnnnnnnnnnnnnnnnnnnnnnnnnnnnnnnnnnnnnnnnnnnnnnnnnnnnnnnnnnnnnnnnnnnnnnnnnnnnnnnnnnnnnnnnnnnnnnnnnnnnnnnnnnnnnnnnnnnnnnnnnnnnnnnnnnnnnnnnnnnnnnnnnnnnnnnnnnnnnnnnnnnnnnnnnnnnnnnnnnnnnnnnnnnnnnnnnnnnnnnnnnnnnnnnnnnnnnnnnnnnnnnnnnnnnnnnnnnnnnnnnnnnnnnnnnnnnnnnnnnnnnnnnnnnnnnnnnnnnnnnnnnnnnnnnnnnnnnnnnnnnnnnnnnnnnnnnnnnnnnnnnnnnnnnnnnnnnnnnnnnnnnnnnnnnnnnnnnnnnnnnnnnnnnnnnnnnnnnnnnnnnnnnnnnnnnnnnnnnnnnnnnnnnnnnnnnnnnnnnnnnnnnnnnnnnnnnnnnnnnnnnnnnnnnnnnnnnnnnnnnnnnnnnnnnnnnnnnnnnnnnnnnnnnnnnnnnnnnnnnnnnnnnnnnnnnnnnnnnnnnnnnnnnnnnnnnnnnnnnnnnnnnnnnnnnnnnnnnnnnnnnnnnnnnnnnnnnnnnnnnnnnnnnnnnnnnnnnnnnnnnnnnnnnnnnnnnnnnnnnnnnnnnnnnnnnnnnnnnnnnnnnnnnnnnnnnnnnnnnnnnnnnnnnnnnnnnnnnnnnnnnnnnnnnnnnnnnnnnnnnnnnnnnnnnnnnnnnnnnnnnnnnnnnnnnnnnnnnnnnnnnnnnnnnnnnnnnnnnnnnnnnnnnnnnnnnnnnnnnnnnnnnnnnnnnnnnnnnnnnnnnnnnnnnnnnnnnnnnnnnnnnnnnnnnnnnnnnnnnnnnnnnnnnnnnnnnnnnnnnnnnnnnnnnnnnnnnnnnnnnnnnnnnnnnnnnnnnnnnnnnnnnnnnnnnnnnnnnnnnnnnnnnnnnnnnnnnnnnnnnnnnnnnnnnnnnnnnnnnnnnnnnnnnnnnnnnnnnnnnnnnnnnnnnnnnnnnnnnnnnnnnnnnnnnnnnnnnnnnnnnnnnnnnnnnnnnnnnnnnnnnnnnnnnnnnnnnnnnnnnnnnnnnnnnnnnnnnnnnnnnnnnnnnnnnnnnnnnnnnnnnnnnnnnnnnnnnnnnnnnnnnnnnnnnnnnnnnnnnnnnnnnnnnnnnnnnnnnnnnnnnnnnnnnnnnnnnnnnnnnnnnnnnnnnnnnnnnnnnnnnnnnnnnnnnnnnnnnnnnnnnnnnnnnnnnnnnnnnnnnnnnnnnnnnnnnnnnnnnnnnnnnnnnnnnnnnnnnnnnnnnnnnnnnnnnnnnnnnnnnnnnnnnnnnnnnnnnnnnnnnnnnnnnnnnnnnnnnnnnnnnnnnnnnnnnnnnnnnnnnnnnnnnnnnnnnnnnnnnnnnnnnnnnnnnnnnnnnnnnnnnnnnnnnnnnnnnnnnnnnnnnnnnnnnnnnnnnnnnnnnnnnnnnnnnnnnnnnnnnnnnnnnnnnnnnnnnnnnnnnnnnnnnnnnnnnnnnnnnnnnnnnnnnnnnnnnnnnnnnnnnnnnnnnnnnnnnnnnnnnnnnnnnnnnnnnnnnnnnnnnnnnnnnnnnnnnnnnnnnnnnnnnnnnnnnnnnnnnnnnnnnnnnnnnnnnnnnnnnnnnnnnnnnnnnnnnnnnnnnnnnnnnnnnnnnnnnnnnnnnnnnnnnnnnnnnnnnnnnnnnnnnnnnnnnnnnnnnnnnnnnnnnnnnnnnnnnnnnnnnnnnnnnnnnnnnnnnnnnnnnnnnnnnnnnnnnnnnnnnnnnnnnnnnnnnnnnnnnnnnnnnnnnnnnnnnnnnnnnnnnnnnnnnnnnnnnnnnnnnnnnnnnnnnnnnnnnnnnnnnnnnnnnnnnnnnnnnnnnnnnnnnnnnnnnnnnnnnnnnnnnnnnnnnnnnnnnnnnnnnnnnnnnnnnnnnnnnnnnnnnnnnnnnnnnnnnnnnnnnnnnnnnnnnnnnnnnnnnnnnnnnnnnnnnnnnnnnnnnnnnnnnnnnnnnnnnnnnnnnnnnnnnnnnnnnnnnnnnnnnnnnnnnnnnnnnnnnnnnnnnnnnnnnnnnnnnnnnnnnnnnnnnnnnnnnnnnnnnnnnnnnnnnnnnnnnnnnnnnnnnnnnnnnnnnnnnnnnnnnnnnnnnnnnnnnnnnnnnnnnnnnnnnnnnnnnnnnnnnnnnnnnnnnnnnnnnnnnnnnnnnnnnnnnnnnnnnnnnnnnnnnnnnnnnnnnnnnnnnnnnnnnnnnnnnnnnnnnnnnnnnnnnnnnnnnnnnnnnnnnnnnnnnnnnnnnnnnnnnnnnnnnnnnnnnnnnnnnnnnnnnnnnnnnnnnnnnnnnnnnnnnnnnnnnnnnnnnnnnnnnnnnnnnnnnnnnnnnnnnnnnnnnnnnnnnnnnnnnnnnnnnnnnnnnnnnnnnnnnnnnnnnnnnnnnnnnnnnnnnnnnnnnnnnnnnnnnnnnnnnnnnnnnnnnnnnnnnnnnnnnnnnnnnnnnnnnnnnnnnnnnnnnnnnnnnnnnnnnnnnnnnnnnnnnnnnnnnnnnnnnnnnnnnnnnnnnnnnnnnnnnnnnnnnnnnnnnnnnnnnnnnnnnnnnnnnnnnnnnnnnnnnnnnnnnnnnnnnnnnnnnnnnnnnnnnnnnnnnnnnnnnnnnnnnnnnnnnnnnnnnnnnnnnnnnnnnnnnnnnnnnnnnnnnnnnnnnnnnnnnnnnnnnnnnnnnnnnnnnnnnnnnnnnnnnnnnnnnnnnnnnnnnnnnnnnnnnnnnnnnnnnnnnnnnnnnnnnnnnnnnnnnnnnnnnnnnnnnnnnnnnnnnnnnnnnnnnnnnnnnnnnnnnnnnnnnnnnnnnnnnnnnnnnnnnnnnnnnnnnnnnnnnnnnnnnnnnnnnnnnnnnnnnnnnnnnnnnnnnnnnnnnnnnnnnnnnnnnnnnnnnnnnnnnnnnnnnnnnnnnnnnnnnnnnnnnnnnnnnnnnnnnnnnnnnnnnnnnnnnnnnnnnnnnnnnnnnnnnnnnnnnnnnnnnnnnnnnnnnnnnnnnnnnnnnnnnnnnnnnnnnnnnnnnnnnnnnnnnnnnnnnnnnnnnnnnnnnnnnnnnnnnnnnnnnnnnnnnnnnnnnnnnnnnnnnnnnnnnnnnnnnnnnnnnnnnnnnnnnnnnnnnnnnnnnnnnnnnnnnnnnnnnnnnnnnnnnnnnnnnnnnnnnnnnnnnnnnnnnnnnnnnnnnnnnnnnnnnnnnnnnnnnnnnnnnnnnnnnnnnnnnnnnnnnnnnnnnnnnnnnnnnnnnnnnnnnnnnnnnnnnnnnnnnnnnnnnnnnnnnnnnnnnnnnnnnnnnnnnnnnnnnnnnnnnnnnnnnnnnnnnnnnnnnnnnnnnnnnnnnnnnnnnnnnnnnnnnnnnnnnnnnnnnnnnnnnnnnnnnnnnnnnnnnnnnnnnnnnnnnnnnnnnnnnnnnnnnnnnnnnnnnnnnnnnnnnnnnnnnnnnnnnnnnnnnnnnnnnnnnnnnnnnnnnnnnnnnnnnnnnnnnnnnnnnnnnnnnnnnnnnnnnnnnnnnnnnnnnnnnnnnnnnnnnnnnnnnnnnnnnnnnnnnnnnnnnnnnnnnnnnnnnnnnnnnnnnnnnnnnnnnnnnnnnnnnnnnnnnnnnnnnnnnnnnnnnnnnnnnnnnnnnnnnnnnnnnnnnnnnnnnnnnnnnnnnnnnnnnnnnnnnnnnnnnnnnnnnnnnnnnnnnnnnnnnnnnnnnnnnnnnnnnnnnnnnnnnnnnnnnnnnnnnnnnnnnnnnnnnnnnnnnnnnnnnnnnnnnnnnnnnnnnnnnnnnnnnnnnnnnnnnnnnnnnnnnnnnnnnnnnnnnnnnnnnnnnnnnnnnnnnnnnnnnnnnnnnnnnnnnnnnnnnnnnnnnnnnnnnnnnnnnnnnnnnnnnnnnnnnnnnnnnnnnnnnnnnnnnnnnnnnnnnnnnnnnnnnnnnnnnnnnnnnnnnnnnnnnnnnnnnnnnnnnnnnnnnnnnnnnnnnnnnnnnnnnnnnnnnnnnnnnnnnnnnnnnnnnnnnnnnnnnnnnnnnnnnnnnnnnnnnnnnnnnnnnnnnnnnnnnnnnnnnnnnnnnnnnnnnnnnnnnnnnnnnnnnnnnnnnnnnnnnnnnnnnnnnnnnnnnnnnnnnnnnnnnnnnnnnnnnnnnnnnnnnnnnnnnnnnnnnnnnnnnnnnnnnnnnnnnnnnnnnnnnnnnnnnnnnnnnnnnnnnnnnnnnnnnnnnnnnnnnnnnnnnnnnnnnnnnnnnnnnnnnnnnnnnnnnnnnnnnnnnnnnnnnnnnnnnnnnnnnnnnnnnnnnnnnnnnnnnnnnnnnnnnnnnnnnnnnnnnnnnnnnnnnnnnnnnnnnnnnnnnnnnnnnnnnnnnnnnnnnnnnnnnnnnnnnnnnnnnnnnnnnnnnnnnnnnnnnnnnnnnnnnnnnnnnnnnnnnnnnnnnnnnnnnnnnnnnnnnnnnnnnnnnnnnnnnnnnnnnnnnnnnnnnnnnnnnnnnnnnnnnnnnnnnnnnnnnnnnnnnnnnnnnnnnnnnnnnnnnnnnnnnnnnnnnnnnnnnnnnnnnnnnnnnnnnnnnnnnnnnnnnnnnnnnnnnnnnnnnnnnnnnnnnnnnnnnnnnnnnnnnnnnnnnnnnnnnnnnnnnnnnnnnnnnnnnnnnnnnnnnnnnnnnnnnnnnnnnnnnnnnnnnnnnnnnnnnnnnnnnnnnnnnnnnnnnnnnnnnnnnnnnnnnnnnnnnnnnnnnnnnnnnnnnnnnnnnnnnnnnnnnnnnnnnnnnnnnnnnnnnnnnnnnnnnnnnnnnnnnnnnnnnnnnnnnnnnnnnnnnnnnnnnnnnnnnnnnnnnnnnnnnnnnnnnnnnnnnnnnnnnnnnnnnnnnnnnnnnnnnnnnnnnnnnnnnnnnnnnnnnnnnnnnnnnnnnnnnnnnnnnnnnnnnnnnnnnnnnnnnnnnnnnnnnnnnnnnnnnnnnnnnnnnnnnnnnnnnnnnnnnnnnnnnnnnnnnnnnnnnnnnnnnnnnnnnnnnnnnnnnnnnnnnnnnnnnnnnnnnnnnnnnnnnnnnnnnnnnnnnnnnnnnnnnnnnnnnnnnnnnnnnnnnnnnnnnnnnnnnnnnnnnnnnnnnnnnnnnnnnnnnnnnnnnnnnnnnnnnnnnnnnnnnnnnnnnnnnnnnnnnnnnnnnnnnnnnnnnnnnnnnnnnnnnnnnnnnnnnnnnnnnnnnnnnnnnnnnnnnnnnnnnnnnnnnnnnnnnnnnnnnnnnnnnnnnnnnnnnnnnnnnnnnnnnnnnnnnnnnnnnnnnnnnnnnnnnnnnnnnnnnnnnnnnnnnnnnnnnnnnnnnnnnnnnnnnnnnnnnnnnnnnnnnnnnnnnnnnnnnnnnnnnnnnnnnnnnnnnnnnnnnnnnnnnnnnnnnnnnnnnnnnnnnnnnnnnnnnnnnnnnnnnnnnnnnnnnnnnnnnnnnnnnnnnnnnnnnnnnnnnnnnnnnnnnnnnnnnnnnnnnnnnnnnnnnnnnnnnnnnnnnnnnnnnnnnnnnnnnnnnnnnnnnnnnnnnnnnnnnnnnnnnnnnnnnnnnnnnnnnnnnnnnnnnnnnnnnnnnnnnnnnnnnnnnnnnnnnnnnnnnnnnnnnnnnnnnnnnnnnnnnnnnnnnnnnnnnnnnnnnnnnnnnnnnnnnnnnnnnnnnnnnnnnnnnnnnnnnnnnnnnnnnnnnnnnnnnnnnnnnnnnnnnnnnnnnnnnnnnnnnnnnnnnnnnnnnnnnnnnnnnnnnnnnnnnnnnnnnnnnnnnnnnnnnnnnnnnnnnnnnnnnnnnnnnnnnnnnnnnnnnnnnnnnnnnnnnnnnnnnnnnnnnnnnnnnnnnnnnnnnnnnnnnnnnnnnnnnnnnnnnnnnnnnnnnnnnnnnnnnnnnnnnnnnnnnnnnnnnnnnnnnnnnnnnnnnnnnnnnnnnnnnnnnnnnnnnnnnnnnnnnnnnnnnnnnnnnnnnnnnnnnnnnnnnnnnnnnnnnnnnnnnnnnnnnnnnnnnnnnnnnnnnnnnnnnnnnnnnnnnnnnnnnnnnnnnnnnnnnnnnnnnnnnnnnnnnnnnnnnnnnnnnnnnnnnnnnnnnnnnnnnnnnnnnnnnnnnnnnnnnnnnnnnnnnnnnnnnnnnnnnnnnnnnnnnnnnnnnnnnnnnnnnnnnnnnnnnnnnnnnnnnnnnnnnnnnnnnnnnnnnnnnnnnnnnnnnnnnnnnnnnnnnnnnnnnnnnnnnnnnnnnnnnnnnnnnnnnnnnnnnnnnnnnnnnnnnnnnnnnnnnnnnnnnnnnnnnnnnnnnnnnnnnnnnnnnnnnnnnnnnnnnnnnnnnnnnnnnnnnnnnnnnnnnnnnnnnnnnnnnnnnnnnnnnnnnnnnnnnnnnnnnnnnnnnnnnnnnnnnnnnnnnnnnnnnnnnnnnnnnnnnnnnnnnnnnnnnnnnnnnnnnnnnnnnnnnnnnnnnnnnnnnnnnnnnnnnnnnnnnnnnnnnnnnnnnnnnnnnnnnnnnnnnnnnnnnnnnnnnnnnnnnnnnnnnnnnnnnnnnnnnnnnnnnnnnnnnnnnnnnnnnnnnnnnnnnnnnnnnnnnnnnnnnnnnnnnnnnnnnnnnnnnnnnnnnnnnnnnnnnnnnnnnnnnnnnnnnnnnnnnnnnnnnnnnnnnnnnnnnnnnnnnnnnnnnnnnnnnnnnnnnnnnnnnnnnnnnnnnnnnnnnnnnnnnnnnnnnnnnnnnnnnnnnnnnnnnnnnnnnnnnnnnnnnnnnnnnnnnnnnnnnnnnnnnnnnnnnnnnnnnnnnnnnnnnnnnnnnnnnnnnnnnnnnnnnnnnnnnnnnnnnnnnnnnnnnnnnnnnnnnnnnnnnnnnnnnnnnnnnnnnnnnnnnnnnnnnnnnnnnnnnnnnnnnnnnnnnnnnnnnnnnnnnnnnnnnnnnnnnnnnnnnnnnnnnnnnnnnnnnnnnnnnnnnnnnnnnnnnnnnnnnnnnnnnnnnnnnnnnnnnnnnnnnnnnnnnnnnnnnnnnnnnnnnnnnnnnnnnnnnnnnnnnnnnnnnnnnnnnnnnnnnnnnnnnnnnnnnnnnnnnnnnnnnnnnnnnnnnnnnnnnnnnnnnnnnnnnnnnnnnnnnnnnnnnnnnnnnnnnnnnnnnnnnnnnnnnnnnnnnnnnnnnnnnnnnnnnnnnnnnnnnnnnnnnnnnnnnnnnnnnnnnnnnnnnnnnnnnnnnnnnnnnnnnnnnnnnnnnnnnnnnnnnnnnnnnnnnnnnnnnnnnnnnnnnnnnnnnnnnnnnnnnnnnnnnnnnnnnnnnnnnnnnnnnnnnnnnnnnnnnnnnnnnnnnnnnnnnnnnnnnnnnnnnnnnnnnnnnnnnnnnnnnnnnnnnnnnnnnnnnnnnnnnnnnnnnnnnnnnnnnnnnnnnnnnnnnnnnnnnnnnnnnnnnnnnnnnnnnnnnnnnnnnnnnnnnnnnnnnnnnnnnnnnnnnnnnnnnnnnnnnnnnnnnnnnnnnnnnnnnnnnnnnnnnnnnnnnnnnnnnnnnnnnnnnnnnnnnnnnnnnnnnnnnnnnnnnnnnnnnnnnnnnnnnnnnnnnnnnnnnnnnnnnnnnnnnnnnnnnnnnnnnnnnnnnnnnnnnnnnnnnnnnnnnnnnnnnnnnnnnnnnnnnnnnnnnnnnnnnnnnnnnnnnnnnnnnnnnnnnnnnnnnnnnnnnnnnnnnnnnnnnnnnnnnnnnnnnnnnnnnnnnnnnnnnnnnnnnnnnnnnnnnnnnnnnnnnnnnnnnnnnnnnnnnnnnnnnnnnnnnnnnnnnnnnnnnnnnnnnnnnnnnnnnnnnnnnnnnnnnnnnnnnnnnnnnnnnnnnnnnnnnnnnnnnnnnnnnnnnnnnnnnnnnnnnnnnnnnnnnnnnnnnnnnnnnnnnnnnnnnnnnnnnnnnnnnnnnnnnnnnnnnnnnnnnnnnnnnnnnnnnnnnnnnnnnnnnnnnnnnnnnnnnnnnnnnnnnnnnnnnnnnnnnnnnnnnnnnnnnnnnnnnnnnnnnnnnnnnnnnnnnnnnnnnnnnnnnnnnnnnnnnnnnnnnnnnnnnnnnnnnnnnnnnnnnnnnnnnnnnnnnnnnnnnnnnnnnnnnnnnnnnnnnnnnnnnnnnnnnnnnnnnnnnnnnnnnnnnnnnnnnnnnnnnnnnnnnnnnnnnnnnnnnnnnnnnnnnnnnnnnnnnnnnnnnnnnnnnnnnnnnnnnnnnnnnnnnnnnnnnnnnnnnnnnnnnnnnnnnnnnnnnnnnnnnnnnnnnnnnnnnnnnnnnnnnnnnnnnnnnnnnnnnnnnnnnnnnnnnnnnnnnnnnnnnnnnnnnnnnnnnnnnnnnnnnnnnnnnnnnnnnnnnnnnnnnnnnnnnnnnnnnnnnnnnnnnnnnnnnnnnnnnnnnnnnnnnnnnnnnnnnnnnnnnnnnnnnnnnnnnnnnnnnnnnnnnnnnnnnnnnnnnnnnnnnnnnnnnnnnnnnnnnnnnnnnnnnnnnnnnnnnnnnnnnnnnnnnnnnnnnnnnnnnnnnnnnnnnnnnnnnnnnnnnnnnnnnnnnnnnnnnnnnnnnnnnnnnnnnnnnnnnnnnnnnnnnnnnnnnnnnnnnnnnnnnnnnnnnnnnnnnnnnnnnnnnnnnnnnnnnnnnnnnnnnnnnnnnnnnnnnnnnnnnnnnnnnnnnnnnnnnnnnnnnnnnnnnnnnnnnnnnnnnnnnnnnnnnnnnnnnnnnnnnnnnnnnnnnnnnnnnnnnnnnnnnnnnnnnnnnnnnnnnnnnnnnnnnnnnnnnnnnnnnnnnnnnnnnnnnnnnnnnnnnnnnnnnnnnnnnnnnnnnnnnnnnnnnnnnnnnnnnnnnnnnnnnnnnnnnnnnnnnnnnnnnnnnnnnnnnnnnnnnnnnnnnnnnnnnnnnnnnnnnnnnnnnnnnnnnnnnnnnnnnnnnnnnnnnnnnnnnnnnnnnnnnnnnnnnnnnnnnnnnnnnnnnnnnnnnnnnnnnnnnnnnnnnnnnnnnnnnnnnnnnnnnnnnnnnnnnnnnnnnnnnnnnnnnnnnnnnnnnnnnnnnnnnnnnnnnnnnnnnnnnnnnnnnnnnnnnnnnnnnnnnnnnnnnnnnnnnnnnnnnnnnnnnnnnnnnnnnnnnnnnnnnnnnnnnnnnnnnnnnnnnnnnnnnnnnnnnnnnnnnnnnnnnnnnnnnnnnnnnnnnnnnnnnnnnnnnnnnnnnnnnnnnnnnnnnnnnnnnnnnnnnnnnnnnnnnnnnnnnnnnnnnnnnnnnnnnnnnnnnnnnnnnnnnnnnnnnnnnnnnnnnnnnnnnnnnnnnnnnnnnnnnnnnnnnnnnnnnnnnnnnnnnnnnnnnnnnnnnnnnnnnnnnnnnnnnnnnnnnnnnnnnnnnnnnnnnnnnnnnnnnnnnnnnnnnnnnnnnnnnnnnnnnnnnnnnnnnnnnnnnnnnnnnnnnnnnnnnnnnnnnnnnnnnnnnnnnnnnnnnnnnnnnnnnnnnnnnnnnnnnnnnnnnnnnnnnnnnnnnnnnnnnnnnnnnnnnnnnnnnnnnnnnnnnnnnnnnnnnnnnnnnnnnnnnnnnnnnnnnnnnnnnnnnnnnnnnnnnnnnnnnnnnnnnnnnnnnnnnnnnnnnnnnnnnnnnnnnnnnnnnnnnnnnnnnnnnnnnnnnnnnnnnnnnnnnnnnnnnnnnnnnnnnnnnnnnnnnnnnnnnnnnnnnnnnnnnnnnnnnnnnnnnnnnnnnnnnnnnnnnnnnnnnnnnnnnnnnnnnnnnnnnnnnnnnnnnnnnnnnnnnnnnnnnnnnnnnnnnnnnnnnnnnnnnnnnnnnnnnnnnnnnnnnnnnnnnnnnnnnnnnnnnnnnnnnnnnnnnnnnnnnnnnnnnnnnnnnnnnnnnnnnnnnnnnnnnnnnnnnnnnnnnnnnnnnnnnnnnnnnnnnnnnnnnnnnnnnnnnnnnnnnnnnnnnnnnnnnnnnnnnnnnnnnnnnnnnnnnnnnnnnnnnnnnnnnnnnnnnnnnnnnnnnnnnnnnnnnnnnnnnnnnnnnnnnnnnnnnnnnnnnnnnnnnnnnnnnnnnnnnnnnnnnnnnnnnnnnnnnnnnnnnnnnnnnnnnnnnnnnnnnnnnnnnnnnnnnnnnnnnnnnnnnnnnnnnnnnnnnnnnnnnnnnnnnnnnnnnnnnnnnnnnnnnnnnnnnnnnnnnnnnnnnnnnnnnnnnnnnnnnnnnnnnnnnnnnnnnnnnnnnnnnnnnnnnnnnnnnnnnnnnnnnnnnnnnnnnnnnnnnnnnnnnnnnnnnnnnnnnnnnnnnnnnnnnnnnnnnnnnnnnnnnnnnnnnnnnnnnnnnnnnnnnnnnnnnnnnnnnnnnnnnnnnnnnnnnnnnnnnnnnnnnnnnnnnnnnnnnnnnnnnnnnnnnnnnnnnnnnnnnnnnnnnnnnnnnnnnnnnnnnnnnnnnnnnnnnnnnnnnnnnnnnnnnnnnnnnnnnnnnnnnnnnnnnnnnnnnnnnnnnnnnnnnnnnnnnnnnnnnnnnnnnnnnnnnnnnnnnnnnnnnnnnnnnnnnnnnnnnnnnnnnnnnnnnnnnnnnnnnnnnnnnnnnnnnnnnnnnnnnnnnnnnnnnnnnnnnnnnnnnnnnnnnnnnnnnnnnnnnnnnnnnnnnnnnnnnnnnnnnnnnnnnnnnnnnnnnnnnnnnnnnnnnnnnnnnnnnnnnnnnnnnnnnnnnnnnnnnnnnnnnnnnnnnnnnnnnnnnnnnnnnnnnnnnnnnnnnnnnnnnnnnnnnnnnnnnnnnnnnnnnnnnnnnnnnnnnnnnnnnnnnnnnnnnnnnnnnnnnnnnnnnnnnnnnnnnnnnnnnnnnnnnnnnnnnnnnnnnnnnnnnnnnnnnnnnnnnnnnnnnnnnnnnnnnnnnnnnnnnnnnnnnnnnnnnnnnnnnnnnnnnnnnnnnnnnnnnnnnnnnnnnnnnnnnnnnnnnnnnnnnnnnnnnnnnnnnnnnnnnnnnnnnnnnnnnnnnnnnnnnnnnnnnnnnnnnnnnnnnnnnnnnnnnnnnnnnnnnnnnnnnnnnnnnnnnnnnnnnnnnnnnnnnnnnnnnnnnnnnnnnnnnnnnnnnnnnnnnnnnnnnnnnnnnnnnnnnnnnnnnnnnnnnnnnnnnnnnnnnnnnnnnnnnnnnnnnnnnnnnnnnnnnnnnnnnnnnnnnnnnnnnnnnnnnnnnnnnnnnnnnnnnnnnnnnnnnnnnnnnnnnnnnnnnnnnnnnnnnnnnnnnnnnnnnnnnnnnnnnnnnnnnnnnnnnnnnnnnnnnnnnnnnnnnnnnnnnnnnnnnnnnnnnnnnnnnnnnnnnnnnnnnnnnnnnnnnnnnnnnnnnnnnnnnnnnnnnnnnnnnnnnnnnnnnnnnnnnnnnnnnnnnnnnnnnnnnnnnnnnnnnnnnnnnnnnnnnnnnnnnnnnnnnnnnnnnnnnnnnnnnnnnnnnnnnnnnnnnnnnnnnnnnnnnnnnnnnnnnnnnnnnnnnnnnnnnnnnnnnnnnnnnnnnnnnnnnnnnnnnnnnnnnnnnnnnnnnnnnnnnnnnnnnnnnnnnnnnnnnnnnnnnnnnnnnnnnnnnnnnnnnnnnnnnnnnnnnnnnnnnnnnnnnnnnnnnnnnnnnnnnnnnnnnnnnnnnnnnnnnnnnnnnnnnnnnnnnnnnnnnnnnnnnnnnnnnnnnnnnnnnnnnnnnnnnnnnnnnnnnnnnnnnnnnnnnnnnnnnnnnnnnnnnnnnnnnnnnnnnnnnnnnnnnnnnnnnnnnnnnnnnnnnnnnnnnnnnnnnnnnnnnnnnnnnnnnnnnnnnnnnnnnnnnnnnnnnnnnnnnnnnnnnnnnnnnnnnnnnnnnnnnnnnnnnnnnnnnnnnnnnnnnnnnnnnnnnnnnnnnnnnnnnnnnnnnnnnnnnnnnnnnnnnnnnnnnnnnnnnnnnnnnnnnnnnnnnnnnnnnnnnnnnnnnnnnnnnnnnnnnnnnnnnnnnnnnnnnnnnnnnnnnnnnnnnnnnnnnnnnnnnnnnnnnnnnnnnnnnnnnnnnnnnnnnnnnnnnnnnnnnnnnnnnnnnnnnnnnnnnnnnnnnnnnnnnnnnnnnnnnnnnnnnnnnnnnnnnnnnnnnnnnnnnnnnnnnnnnnnnnnnnnnnnnnnnnnnnnnnnnnnnnnnnnnnnnnnnnnnnnnnnnnnnnnnnnnnnnnnnnnnnnnnnnnnnnnnnnnnnnnnnnnnnnnnnnnnnnnnnnnnnnnnnnnnnnnnnnnnnnnnnnnnnnnnnnnnnnnnnnnnnnnnnnnnnnnnnnnnnnnnnnnnnnnnnnnnnnnnnnnnnnnnnnnnnnnnnnnnnnnnnnnnnnnnnnnnnnnnnnnnnnnnnnnnnnnnnnnnnnnnnnnnnnnnnnnnnnnnnnnnnnnnnnnnnnnnnnnnnnnnnnnnnnnnnnnnnnnnnnnnnnnnnnnnnnnnnnnnnnnnnnnnnnnnnnnnnnnnnnnnnnnnnnnnnnnnnnnnnnnnnnnnnnnnnnnnnnnnnnnnnnnnnnnnnnnnnnnnnnnnnnnnnnnnnnnnnnnnnnnnnnnnnnnnnnnnnnnnnnnnnnnnnnnnnnnnnnnnnnnnnnnnnnnnnnnnnnnnnnnnnnnnnnnnnnnnnnnnnnnnnnnnnnnnnnnnnnnnnnnnnnnnnnnnnnnnnnnnnnnnnnnnnnnnnnnnnnnnnnnnnnnnnnnnnnnnnnnnnnnnnnnnnnnnnnnnnnnnnnnnnnnnnnnnnnnnnnnnnnnnnnnnnnnnnnnnnnnnnnnnnnnnnnnnnnnnnnnnnnnnnnnnnnnnnnnnnnnnnnnnnnnnnnnnnnnnnnnnnnnnnnnnnnnnnnnnnnnnnnnnnnnnnnnnnnnnnnnnnnnnnnnnnnnnnnnnnnnnnnnnnnnnnnnnnnnnnnnnnnnnnnnnnnnnnnnnnnnnnnnnnnnnnnnnnnnnnnnnnnnnnnnnnnnnnnnnnnnnnnnnnnnnnnnnnnnnnnnnnnnnnnnnnnnnnnnnnnnnnnnnnnnnnnnnnnnnnnnnnnnnnnnnnnnnnnnnnnnnnnnnnnnnnnnnnnnnnnnnnnnnnnnnnnnnnnnnnnnnnnnnnnnnnnnnnnnnnnnnnnnnnnnnnnnnnnnnnnnnnnnnnnnnnnnnnnnnnnnnnnnnnnnnnnnnnnnnnnnnnnnnnnnnnnnnnnnnnnnnnnnnnnnnnnnnnnnnnnnnnnnnnnnnnnnnnnnnnnnnnnnnnnnnnnnnnnnnnnnnnnnnnnnnnnnnnnnnnnnnnnnnnnnnnnnnnnnnnnnnnnnnnnnnnnnnnnnnnnnnnnnnnnnnnnnnnnnnnnnnnnnnnnnnnnnnnnnnnnnnnnnnnnnnnnnnnnnnnnnnnnnnnnnnnnnnnnnnnnnnnnnnnnnnnnnnnnnnnnnnnnnnnnnnnnnnnnnnnnnnnnnnnnnnnnnnnnnnnnnnnnnnnnnnnnnnnnnnnnnnnnnnnnnnnnnnnnnnnnnnnnnnnnnnnnnnnnnnnnnnnnnnnnnnnnnnnnnnnnnnnnnnnnnnnnnnnnnnnnnnnnnnnnnnnnnnnnnnnnnnnnnnnnnnnnnnnnnnnnnnnnnnnnnnnnnnnnnnnnnnnnnnnnnnnnnnnnnnnnnnnnnnnnnnnnnnnnnnnnnnnnnnnnnnnnnnnnnnnnnnnnnnnnnnnnnnnnnnnnnnnnnnnnnnnnnnnnnnnnnnnnnnnnnnnnnnnnnnnnnnnnnnnnnnnnnnnnnnnnnnnnnnnnnnnnnnnnnnnnnnnnnnnnnnnnnnnnnnnnnnnnnnnnnnnnnnnnnnnnnnnnnnnnnnnnnnnnnnnnnnnnnnnnnnnnnnnnnnnnnnnnnnnnnnnnnnnnnnnnnnnnnnnnnnnnnnnnnnnnnnnnnnnnnnnnnnnnnnnnnnnnnnnnnnnnnnnnnnnnnnnnnnnnnnnnnnnnnnnnnnnnnnnnnnnnnnnnnnnnnnnnnnnnnnnnnnnnnnnnnnnnnnnnnnnnnnnnnnnnnnnnnnnnnnnnnnnnnnnnnnnnnnnnnnnnnnnnnnnnnnnnnnnnnnnnnnnnnnnnnnnnnnnnnnnnnnnnnnnnnnnnnnnnnnnnnnnnnnnnnnnnnnnnnnnnnnnnnnnnnnnnnnnnnnnnnnnnnnnnnnnnnnnnnnnnnnnnnnnnnnnnnnnnnnnnnnnnnnnnnnnnnnnnnnnnnnnnnnnnnnnnnnnnnnnnnnnnnnnnnnnnnnnnnnnnnnnnnnnnnnnnnnnnnnnnnnnnnnnnnnnnnnnnnnnnnnnnnnnnnnnnnnnnnnnnnnnnnnnnnnnnnnnnnnnnnnnnnnnnnnnnnnnnnnnnnnnnnnnnnnnnnnnnnnnnnnnnnnnnnnnnnnnnnnnnnnnnnnnnnnnnnnnnnnnnnnnnnnnnnnnnnnnnnnnnnnnnnnnnnnnnnnnnnnnnnnnnnnnnnnnnnnnnnnnnnnnnnnnnnnnnnnnnnnnnnnnnnnnnnnnnnnnnnnnnnnnnnnnnnnnnnnnnnnnnnnnnnnnnnnnnnnnnnnnnnnnnnnnnnnnnnnnnnnnnnnnnnnnnnnnnnnnnnnnnnnnnnnnnnnnnnnnnnnnnnnnnnnnnnnnnnnnnnnnnnnnnnnnnnnnnnnnnnnnnnnnnnnnnnnnnnnnnnnnnnnnnnnnnnnnnnnnnnnnnnnnnnnnnnnnnnnnnnnnnnnnnnnnnnnnnnnnnnnnnnnnnnnnnnnnnnnnnnnnnnnnnnnnnnnnnnnnnnnnnnnnnnnnnnnnnnnnnnnnnnnnnnnnnnnnnnnnnnnnnnnnnnnnnnnnnnnnnnnnnnnnnnnnnnnnnnnnnnnnnnnnnnnnnnnnnnnnnnnnnnnnnnnnnnnnnnnnnnnnnnnnnnnnnnnnnnnnnnnnnnnnnnnnnnnnnnnnnnnnnnnnnnnnnnnnnnnnnnnnnnnnnnnnnnnnnnnnnnnnnnnnnnnnnnnnnnnnnnnnnnnnnnnnnnnnnnnnnnnnnnnnnnnnnnnnnnnnnnnnnnnnnnnnnnnnnnnnnnnnnnnnnnnnnnnnnnnnnnnnnnnnnnnnnnnnnnnnnnnnnnnnnnnnnnnnnnnnnnnnnnnnnnnnnnnnnnnnnnnnnnnnnnnnnnnnnnnnnnnnnnnnnnnnnnnnnnnnnnnnnnnnnnnnnnnnnnnnnnnnnnnnnnnnnnnnnnnnnnnnnnnnnnnnnnnnnnnnnnnnnnnnnnnnnnnnnnnnnnnnnnnnnnnnnnnnnnnnnnnnnnnnnnnnnnnnnnnnnnnnnnnnnnnnnnnnnnnnnnnnnnnnnnnnnnnnnnnnnnnnnnnnnnnnnnnnnnnnnnnnnnnnnnnnnnnnnnnnnnnnnnnnnnnnnnnnnnnnnnnnnnnnnnnnnnnnnnnnnnnnnnnnnnnnnnnnnnnnnnnnnnnnnnnnnnnnnnnnnnnnnnnnnnnnnnnnnnnnnnnnnnnnnnnnnnnnnnnnnnnnnnnnnnnnnnnnnnnnnnnnnnnnnnnnnnnnnnnnnnnnnnnnnnnnnnnnnnnnnnnnnnnnnnnnnnnnnnnnnnnnnnnnnnnnnnnnnnnnnnnnnnnnnnnnnnnnnnnnnnnnnnnnnnnnnnnnnnnnnnnnnnnnnnnnnnnnnnnnnnnnnnnnnnnnnnnnnnnnnnnnnnnnnnnnnnnnnnnnnnnnnnnnnnnnnnnnnnnnnnnnnnnnnnnnnnnnnnnnnnnnnnnnnnnnnnnnnnnnnnnnnnnnnnnnnnnnnnnnnnnnnnnnnnnnnnnnnnnnnnnnnnnnnnnnnnnnnnnnnnnnnnnnnnnnnnnnnnnnnnnnnnnnnnnnnnnnnnnnnnnnnnnnnnnnnnnnnnnnnnnnnnnnnnnnnnnnnnnnnnnnnnnnnnnnnnnnnnnnnnnnnnnnnnnnnnnnnnnnnnnnnnnnnnnnnnnnnnnnnnnnnnnnnnnnnnnnnnnnnnnnnnnnnnnnnnnnnnnnnnnnnnnnnnnnnnnnnnnnnnnnnnnnnnnnnnnnnnnnnnnnnnnnnnnnnnnnnnnnnnnnnnnnnnnnnnnnnnnnnnnnnnnnnnnnnnnnnnnnnnnnnnnnnnnnnnnnnnnnnnnnnnnnnnnnnnnnnnnnnnnnnnnnnnnnnnnnnnnnnnnnnnnnnnnnnnnnnnnnnnnnnnnnnnnnnnnnnnnnnnnnnnnnnnnnnnnnnnnnnnnnnnnnnnnnnnnnnnnnnnnnnnnnnnnnnnnnnnnnnnnnnnnnnnnnnnnnnnnnnnnnnnnnnnnnnnnnnnnnnnnnnnnnnnnnnnnnnnnnnnnnnnnnnnnnnnnnnnnnnnnnnnnnnnnnnnnnnnnnnnnnnnnnnnnnnnnnnnnnnnnnnnnnnnnnnnnnnnnnnnnnnnnnnnnnnnnnnnnnnnnnnnnnnnnnnnnnnnnnnnnnnnnnnnnnnnnnnnnnnnnnnnnnnnnnnnnnnnnnnnnnnnnnnnnnnnnnnnnnnnnnnnnnnnnnnnnnnnnnnnnnnnnnnnnnnnnnnnnnnnnnnnnnnnnnnnnnnnnnnnnnnnnnnnnnnnnnnnnnnnnnnnnnnnnnnnnnnnnnnnnnnnnnnnnnnnnnnnnnnnnnnnnnnnnnnnnnnnnnnnnnnnnnnnnnnnnnnnnnnnnnnnnnnnnnnnnnnnnnnnnnnnnnnnnnnnnnnnnnnnnnnnnnnnnnnnnnnnnnnnnnnnnnnnnnnnnnnnnnnnnnnnnnnnnnnnnnnnnnnnnnnnnnnnnnnnnnnnnnnnnnnnnnnnnnnnnnnnnnnnnnnnnnnnnnnnnnnnnnnnnnnnnnnnnnnnnnnnnnnnnnnnnnnnnnnnnnnnnnnnnnnnnnnnnnnnnnnnnnnnnnnnnnnnnnnnnnnnnnnnnnnnnnnnnnnnnnnnnnnnnnnnnnnnnnnnnnnnnnnnnnnnnnnnnnnnnnnnnnnnnnnnnnnnnnnnnnnnnnnnnnnnnnnnnnnnnnnnnnnnnnnnnnnnnnnnnnnnnnnnnnnnnnnnnnnnnnnnnnnnnnnnnnnnnnnnnnnnnnnnnnnnnnnnnnnnnnnnnnnnnnnnnnnnnnnnnnnnnnnnnnnnnnnnnnnnnnnnnnnnnnnnnnnnnnnnnnnnnnnnnnnnnnnnnnnnnnnnnnnnnnnnnnnnnnnnnnnnnnnnnnnnnnnnnnnnnnnnnnnnnnnnnnnnnnnnnnnnnnnnnnnnnnnnnnnnnnnnnnnnnnnnnnnnnnnnnnnnnnnnnnnnnnnnnnnnnnnnnnnnnnnnnnnnnnnnnnnnnnnnnnnnnnnnnnnnnnnnnnnnnnnnnnnnnnnnnnnnnnnnnnnnnnnnnnnnnnnnnnnnnnnnnnnnnnnnnnnnnnnnnnnnnnnnnnnnnnnnnnnnnnnnnnnnnnnnnnnnnnnnnnnnnnnnnnnnnnnnnnnnnnnnnnnnnnnnnnnnnnnnnnnnnnnnnnnnnnnnnnnnnnnnnnnnnnnnnnnnnnnnnnnnnnnnnnnnnnnnnnnnnnnnnnnnnnnnnnnnnnnnnnnnnnnnnnnnnnnnnnnnnnnnnnnnnnnnnnnnnnnnnnnnnnnnnnnnnnnnnnnnnnnnnnnnnnnnnnnnnnnnnnnnnnnnnnnnnnnnnnnnnnnnnnnnnnnnnnnnnnnnnnnnnnnnnnnnnnnnnnnnnnnnnnnnnnnnnnnnnnnnnnnnnnnnnnnnnnnnnnnnnnnnnnnnnnnnnnnnnnnnnnnnnnnnnnnnnnnnnnnnnnnnnnnnnnnnnnnnnnnnnnnnnnnnnnnnnnnnnnnnnnnnnnnnnnnnnnnnnnnnnnnnnnnnnnnnnnnnnnnnnnnnnnnnnnnnnnnnnnnnnnnnnnnnnnnnnnnnnnnnnnnnnnnnnnnnnnnnnnnnnnnnnnnnnnnnnnnnnnnnnnnnnnnnnnnnnnnnnnnnnnnnnnnnnnnnnnnnnnnnnnnnnnnnnnnnnnnnnnnnnnnnnnnnnnnnnnnnnnnnnnnnnnnnnnnnnnnnnnnnnnnnnnnnnnnnnnnnnnnnnnnnnnnnnnnnnnnnnnnnnnnnnnnnnnnnnnnnnnnnnnnnnnnnnnnnnnnnnnnnnnnnnnnnnnnnnnnnnnnnnnnnnnnnnnnnnnnnnnnnnnnnnnnnnnnnnnnnnnnnnnnnnnnnnnnnnnnnnnnnnnnnnnnnnnnnnnnnnnnnnnnnnnnnnnnnnnnnnnnnnnnnnnnnnnnnnnnnnnnnnnnnnnnnnnnnnnnnnnnnnnnnnnnnnnnnnnnnnnnnnnnnnnnnnnnnnnnnnnnnnnnnnnnnnnnnnnnnnnnnnnnnnnnnnnnnnnnnnnnnnnnnnnnnnnnnnnnnnnnnnnnnnnnnnnnnnnnnnnnnnnnnnnnnnnnnnnnnnnnnnnnnnnnnnnnnnnnnnnnnnnnnnnnnnnnnnnnnnnnnnnattattatatattgatattatatcatctctaccttcccttcatctcttgtttgcggcatgagccactgcaaaccggcattctcccctggtccggctggatataagagataagcgtattttgtgaatttgtcccccaactcactgtgccacaataacacacggattcacaagccatatttaccggttgtgaatttgtgaatctgaccttgccggccttaaggaagtttgaaattagagccctattttggacttgacaaattattccttggtaaatttggtgtataatagctatggggcataatgatgttagcctgtggaacggcctctgtaaaggatcaacaagctatcaaccctccccatgcgacaggagcttcaatgtattataatttgacagacaaaccctggatcagtgtgctacagcttgacgggcattctgccaggctcggcctggctgaggtcctgcgaaaagcacacacactgcgtttggcttacggcaatccgatggaccgcatgtccgttttccgtttcctcctcgccctgggctattggtgttttgccaatacaaaacaagcgccggtatcagataagccactgcctcaggcatggacggactggcttgaacaaaaccaagaatatttcgaattgttcggtgatggccccagattctaccaatccccaggaacatccagaatacgccccagcacggaccttatccacgagcttcccacggcaaacaatttctggcacttccgccatgtgaccgatttcatcgatggcatttgcccagcttgctgcgttaccggtctgctgcgcctgccactctttaccaccgtaggcggcagcggaatcggagccggcatcaacagaactcctcccttctatgccatctggcagggtgatagtctgtcggaatcgatattcctgaattgggaacccacttcccggttgggtgttcctgcctggctgaacccgtttggatcccaaaacgagaaggatgtagccttgctgactggcctcacctggctgccccgcaaggtattcctgcttggcccggtgtcagacggagcaaaatgcagcgcctgcggagaagagcatgagcctctggtctatgcctgcaacaatgaggcggtgaaagtgcctccgaaccttgtctggaacgaccctcacgcgatttaccgggatgacaataatggcctgactgcccaggtggctctgatgtccggggacaaatacactttcgctaacagggattggcataaacccctggtcggcttcttacgggcgaaaggcatgtctcggaccgccacgctgtttttagtgggcttcacaagcgttcaagccaaatgtgtggacgtttgggaaaagaccattgccctatccggaaaaacaagctccgaggaactgctggaccagatatccgaaagagcctactccctgcacaggatgaggaaacaagaccgccggggcgattacaaggaatccgtgggaatcaccgccgtggcggacatcatcccgcacgtagagcatcgggttgacgtccattcgggcgagatggtggaaaacagcggcaatgtctggcaggaagcggatgaagattacggattcttcatgaagcgttttgccgtttctctagtgccggaaattacggttgccgccaagcttgaacgagaacaactggctcggcgcaagccctggcccctaaaaccaaaatcaattaaaaaaccttcatccggaggcgataatgaatgagagcaccgtgaaatttgttcggagcctgggcgaactcaaagagggcgacctgggcttgctcagaaagctcaggggtcgccgtctggatgaatccctgccgggtttcgacctgttttccggcctgtggtggccactccgcagtataagccccaaaacccccaggcggaaggtggtctggctagtcaccaagcttttcgcggaattccgctttgagcaaaagaaaggcgccagcctgccttggctcatgggcagaatatgccgtggacttaaagaagaaaaagagttcccacgtgttttagccaggttcgaccgcttgctcacgctcgagttgaaccaactggaggaaccgctggcgcaagtgctcgcgattttaaaaagacatgacattgccagtctggactgggttgccctcatcgatgacctctccgcttgggaacgggaatcaaacagagcgatatggtcagacacatttatttcagcatttaataatcagcaaggaggaatcaaatgttgattgaaatacacatgatccaaaaccacagcccggccaacctgaaccgggacgacctgggcgcgcccaagacctgttatttcggtggggtgttgcggtcccgcatctccagccagtgcctaaagcggagcatcaggatgagcgatgaattcaaaaacttgctcgggggtatccgtacccgtcggttggccgagttgattacaaaagctacaggacaggactgcaggaatcaggcagaggaagttctgaacaaagccggtttgaaacacgaaaacggacatagtaagatgctggtgttcatgacccggaacaagatcgatgcccttgctcaaattgtcaccagcgaaggcctgagtgttgcagagaaagccaagaaagcggcagatgtaatatcgggggcaatacattcccctgacatcgctctgtgcggaagaatgctcgagcccgataccaaggacaagaacacagacaaggtcaagtgggaaaataccactgttgaagcagccctgcaggtgtcgcacgccatttcaacccacatcgcccgcccagaaatagattactatgtagcagctgatgacgagcctggcgacgacacaggtgctggattcatagacgaggcgatgtttgcttcggcctgtttctacaaatattactcaattgattggaataccttgataatcaacctccagggtaatgaaaagttggcagctcatactgtcggagcctttatccaggccgctgcactcactaatcccagcggaaagcagaacagctttgccgcacataaccttcccgatggaatattggtagaaataaaagagacacctgtcagctatgcaaatgcctttgtgcgaccggtgggaatcgttaaggattctgacttggtagaacaaagcattggccaactggccaactatgtgaaggatataagtgccggtttcttccctggacagatgaaaggcaacgctctgtggttctcgcccaatggacgttatcccctaaagcctcaacagggcacgctggacataaagccagtttgcaacctgctagaacttgttcgcgaagcagttgagatgttgggttttgaatgggatgatgtaaaaaacgagaaagtagagagttgaaatgtcttctccgcctaataccctgttcctgagattggaggctcccattcaggcctggggaagcaatgaggccaaattcgccgtgcgcaggacagccgacgcgcccaccaaatccggagtggcaggcctgctctgcgctgccctgggaatcagccgggccgaagccggacagtattggctgggtgaaattgccaaattgcgcatgggggtgcggatagaccgcccgggcatccgctggtgggattaccatactgtgggagcggagcagaagctgcgcatttctgacctgaaaatgcccaacggcctagttctggttggcactgccctggccaaaaacctgggcgcggacaagatcaaatccaaacccggggctttgctctcccgacgcgagtatttggctgatgccagcttcctggttgcgctccagggtgaaccggatatcgtggcacaactggctgaagcgctgaaaaaaccagtctggacgctttatctggggcgaaaatcctgtcccccctcccgtccggtggatgaacacccgccagggttttatgccagtctgaaagaggctttgcggtcgatcccggcgcaactgagggaaaaaggcgaaccgatacctgacagtgttccctgtgtgctcgactgggttccggcccatgatgacgtgcacgctccgccgaacgccgaagcgcattacgacgtgccggtgtcctttgagcctccccaccacttgccccggctggtgatccgctgtaacctgccattggaccgcaacttcgaggcagagaccgtgctttccggcaaagcctggcaaccgccccgcaaccgggcaaattacgacaatcctgaatacaaaagggtccgcgctgagcgtttggtgatggacaatgccgcctgcatgttctgcaaggcacccgccactactgtgcagcacgtgaattaccgacgcgccggaggcagcgagaagccggaggacttgcgcgccctctgccgcctctgccacgatgcctgcaccatgctggaatatggcagcggcatgaccatggaccgcatagatccctgtgaccccgcctggcgtgagcgcatcttggccaaacgcgaggaaataatcaaattccgctcgctggagcagcgcaggcgcaaactcgatccgaaggaggagaacggatgatgtatctatcccaactgctcatcgacacaggcggcaaccctgaccggccaaggcccgggcgcttgtggctgaacaatatctataatgtccaccggcggctcagcatggctttccccatgcgcaagcgcaaggaaggagacccgaggtttctgcagccctttgaccccgcagattttgaaaagcgccagttcctctttcgggtggacaacaacaccgatggagaaaatcaaagggcgatggttttggtgcagtcgtccctgccgccggattgggactgggctttccagaatgccacgggatttttggcagcccctccccaggttaaggaatacgatccccagttctcagcaggtcagcggctgcgcttccgcatcctcgtgaatgccagtgtcaaacgcaaaatcgacgagttgcgggaaggacccggaggaaaggaaaaaacgggaagggttctgcacaaacgggtcgcccttacctgggacacaaattccaacccaaaggatgcggtggcgcaatggtttgccgccaaggctggcagactgggcttcacgcccggggagaccgaactggtaagcctgggctgggtatacggttccaaaccggagccccggggaaattcgccccggcgtgagaacgaataccgtcccctgagataccgttccgccctgctggaaggttatctgacagtggatgatgcctttctgttccgggaagccttggaaaaaggtatcggcagcgccaaaggaatgggcttcggcctcctttccgtggttccggcaagtgatgcgtaacagagaccttcacctaatgccaaaaatgcgggaccgcttcacctatctctatgtggagcatgccaaaatagacaaagaacaacaggcaatcgcctttcacgatgccatgggctccactcctgttccctgcgctggactggccctgctgatgctggggccaggcgtatccatcacccatgcggccatccttgttttagcagaatgcggctgtttggtggcttgggtgggggaacagggagtccgcttttactcatccgggacagggaccacccgtagttccgccaaccttatgcgtcaggctgccgcctggtcaaatcgagatacgcatctgcggatagttcgcagaatgtatgaattgaggttcaaggaaaaactggacccaaccctctctcttgaacagataaggggaaaagagggagcgagagtacgggatacctatttcagactttcaaaagaattcgatgtgcccatgagtgcgaggaattacgacaggagcaactggaataaaaccgaccccatcaacagagccctgtccgttgccaattcctgtctctatggcatctgccacgccgcgatagtggccgctggctattcacctgccctgggtttcgttcatactggcaaacaactgtcatttgtttgtgacattgccgatctttataaaatggaaacctccgtgcccgcggctttcatagccacagccgcaggggtcgataacctggacagaaggacacgcattgcctgccgtgaccagttctatcaatttggtctgctaaagaagatagtggccgacattcacgcccttttcggtattctggaaacttcggacgatgagccagaccttgctgatgtcgatccagccgtgccaggcgggctttggaacccagatgataaagtgagccccggcggcttgtcatggggtctggatgatcctggaggccatgatgatggttctggtgcttgaaaaagttccctctggcctgagaggagaaattacacgctggctcctcgaaatcaaggctggagtatttgtcggtcaggtatcggccatgataagggaaaagctgtgggacaaggccaggtctggttgtgccggtggaacttgtatcatgatttacagcaagcattgcgaacaaggctttggaattgagttttggggtgccgcggaaaggatagtgacagaatgggaaggattgaaattgatgaccaagcatccgtgatccatacttgaagcctgttcaatggcctcaaagcgtctactttcgaagtgtgttccccacctgcgtgggggtgaaccgaccgctctgcgattgagcgcaacgccatgaccgtgttccccacctgcgtgggggtgaaccgtgtgggcgaactaccgcataattgagccggtggtgttccccacctgcgtgggggtgaaccggctacactatcccgctgtgggaaccggggtaagtgttccccacctgcgtgggg

SEQ ID NO: 1122 - DNA, 20 bp, Artificial Sequence
  Synthetic Oligonucleotide
  misc_feature (1)..(1): n is a, c, g, or t
  misc_feature (4)..(4): n is a, c, g, or t
  misc_feature (7)..(10): n is a, c, g, or t
  misc_feature (15)..(16): n is a, c, g, or t
nddndrnnnndbhdnndrag

SEQ ID NO: 1123 - DNA, 20 bp, Artificial Sequence
  Synthetic Oligonucleotide
ttattgggattgaacttaag

SEQ ID NO: 1124 - DNA, 20 bp, Artificial Sequence
  Synthetic Oligonucleotide
aggatacccgatcaacaaag

SEQ ID NO: 1125 - DNA, 20 bp, Artificial Sequence
  Synthetic Oligonucleotide
atggagtcgttgaagtaaag

SEQ ID NO: 1126 - DNA, 20 bp, Artificial Sequence
  Synthetic Oligonucleotide
agtcagataagtcttgaaag

SEQ ID NO: 1127 - DNA, 20 bp, Artificial Sequence
  Synthetic Oligonucleotide
cgagtatttcagcaaagaag

SEQ ID NO: 1128 - DNA, 20 bp, Artificial Sequence
  Synthetic Oligonucleotide
aaacgagtatttcagtagag

SEQ ID NO: 1129 - DNA, 20 bp, Artificial Sequence
  Synthetic Oligonucleotide
gtgaagaagaacaaggaaag

SEQ ID NO: 1130 - DNA, 20 bp, Artificial Sequence
  Synthetic Oligonucleotide
catgggtcgcggtgctgaag

SEQ ID NO: 1131 - protein, 4 aa, Artificial Sequence
  Synthetic Peptide
GGGS

SEQ ID NO: 1132 - protein, 5 aa, Artificial Sequence
  Synthetic Peptide
GGGGS

SEQ ID NO: 1133 - DNA, 9 bp, Artificial Sequence
  Synthetic Peptide
ggsggsggs

SEQ ID NO: 1134 - protein, 15 aa, Artificial Sequence
  Synthetic Peptide
GGGGSGGGGSGGGGS

SEQ ID NO: 1135 - protein, 10 aa, Artificial Sequence
  Synthetic Peptide
GGGGSGGGGS

SEQ ID NO: 1136 - protein, 20 aa, Artificial Sequence
  Synthetic Peptide
GGGGSGGGGSGGGGSGGGGS

SEQ ID NO: 1137 - DNA, 25 bp, Artificial Sequence
  Synthetic Peptide
ggggsggggsggggsggggsggggs

SEQ ID NO: 1138 - DNA, 30 bp, Artificial Sequence
  Synthetic Peptide
ggggsggggsggggsggggsggggsggggs

SEQ ID NO: 1139 - protein, 35 aa, Artificial Sequence; identical to SEQ ID NO: 421
  Synthetic Peptide

SEQ ID NO: 1140 - protein, 40 aa, Artificial Sequence; identical to SEQ ID NO: 422
  Synthetic Peptide

SEQ ID NO: 1141 - protein, 45 aa, Artificial Sequence; identical to SEQ ID NO: 423
  Synthetic Peptide

SEQ ID NO: 1142 - protein, 50 aa, Artificial Sequence; identical to SEQ ID NO: 424
  Synthetic Peptide

SEQ ID NO: 1143 - protein, 55 aa, Artificial Sequence; identical to SEQ ID NO: 425
  Synthetic Peptide

SEQ ID NO: 1144 - protein, 60 aa, Artificial Sequence; identical to SEQ ID NO: 426
  Synthetic Peptide

SEQ ID NO: 1145 - protein, 32 aa, Artificial Sequence; identical to SEQ ID NO: 427
  Synthetic Peptide

SEQ ID NO: 1146 - protein, 32 aa, Artificial Sequence; identical to SEQ ID NO: 427
  Synthetic Peptide

SEQ ID NO: 1147 - protein, 20 aa, Artificial Sequence
  Synthetic Peptide
PKKKRKVEASSPKKRKVEAS

SEQ ID NO: 1148 - DNA, 27 bp, Artificial Sequence
  Synthetic Oligonucleotide
ggtggtagtggagggagcggcggttca

SEQ ID NO: 1149 - DNA, 72 bp, Artificial Sequence; identical to SEQ ID NO: 433
  Synthetic Oligonucleotide

SEQ ID NO: 1150 - DNA, 48 bp, Artificial Sequence; identical to SEQ ID NO: 434
  Synthetic Oligonucleotide

SEQ ID NO: 1151 - DNA, 192 bp, Artificial Sequence; identical to SEQ ID NO: 435
  Synthetic Oligonucleotide

SEQ ID NO: 1152 - DNA, 108 bp, Artificial Sequence; identical to SEQ ID NO: 436
  Synthetic Oligonucleotide

SEQ ID NO: 1153 - protein, 7 aa, Artificial Sequence
  Synthetic Peptide
PKKKRKV

SEQ ID NO: 1154 - protein, 16 aa, Artificial Sequence
  Synthetic Peptide
KRPAATKKAGQAKKKK

SEQ ID NO: 1155 - protein, 9 aa, Artificial Sequence
  Synthetic Peptide
PAAKRVKLD

SEQ ID NO: 1156 - protein, 11 aa, Artificial Sequence
  Synthetic Peptide
RQRRNELKRSP

SEQ ID NO: 1157 - protein, 38 aa, Artificial Sequence; identical to SEQ ID NO: 441
  Synthetic Peptide

SEQ ID NO: 1158 - protein, 42 aa, Artificial Sequence; identical to SEQ ID NO: 442
  Synthetic Peptide

SEQ ID NO: 1159 - protein, 8 aa, Artificial Sequence
  Synthetic Peptide
VSRKRPRP

SEQ ID NO: 1160 - protein, 8 aa, Artificial Sequence
  Synthetic Peptide
PPKKARED

SEQ ID NO: 1161 - protein, 8 aa, Artificial Sequence
  Synthetic Peptide
PQPKKKPL

SEQ ID NO: 1162 - protein, 12 aa, Artificial Sequence
  Synthetic Peptide
SALIKKKKKMAP

SEQ ID NO: 1163 - protein, 5 aa, Artificial Sequence
  Synthetic Peptide
DRLRR

SEQ ID NO: 1164 - protein, 7 aa, Artificial Sequence
  Synthetic Peptide
PKQKKRK

SEQ ID NO: 1165 - protein, 10 aa, Artificial Sequence
  Synthetic Peptide
RKLKKKIKKL

SEQ ID NO: 1166 - protein, 10 aa, Artificial Sequence
  Synthetic Peptide
REKKKFLKRR

SEQ ID NO: 1167 - protein, 20 aa, Artificial Sequence
  Synthetic Peptide
KRKGDEVDGVDEVAKKKSKK

SEQ ID NO: 1168 - protein, 17 aa, Artificial Sequence
  Synthetic Peptide
RKCLQAGMNLEARKTKK

SEQ ID NO: 1169 - protein, 107 aa, Artificial Sequence; identical to SEQ ID NO: 453
  Synthetic Peptide

SEQ ID NO: 1170 - protein, 9 aa, Artificial Sequence
  Synthetic Peptide
IEVMYPPPY

SEQ ID NO: 1171 - protein, 107 aa, Artificial Sequence; identical to SEQ ID NO: 453
  Synthetic Peptide

SEQ ID NO: 1172 - DNA, 29 bp, Artificial Sequence
  Synthetic Oligonucleotide
gtcttccccacgcatgtgggggtgaaccg

SEQ ID NO: 1173 - DNA, 303 bp, Artificial Sequence
  Synthetic Oligonucleotide
tcatgaagcttctggttgcccgcctttagcccgaagaagcgtcaccaaggctaaaccctcgcgttcgatcagcatccgccttgccgaaccatattgccggaactggaagccctggggcgtcgggcttgaccagatttgcgccacatagcccagaggcggcctttcggtcaccttcgcccaaagctcatccctcaccctccggctgcaatggcccaggaaaactcccggcttgatttccatcagccagcgagacagctttcccctcaagctcgtcgggattttctccgagatcatcagcagcat

SEQ ID NO: 1174 - DNA, 930 bp, Artificial Sequence
  Synthetic Oligonucleotide
tcatccctcaccctccggctgcaatggcccaggaaaactcccggcttgatttccatcagccagcgagacagctttcccctcaagctcgtcgggattttctccgagatcatcagcagcatcgagcacctccgcgatatccggcaatatgcgcctcatcaacttggcctggtgaaaagccacacggcaggccaatcgtgtttcccgctcaagcccgggcccgtccttggcggccatcgtgaatgccatcggtaccgtcaattccgacttgtacaagtccgcgatgtcgtaaacgaagctcagcattttccccacatggatgaacccgaggccggcggaatatccggctccgacgatcgcggcatggcacaggccgtaaaggcacgcgttcgccgccgaaaggcaacgattgacagcgttggccttgaaccagtcatcctggtcgtaggtccgcccgtcccatggaactcccgttttcctgctccattcctcgtagcaaacgcggacccggtatccttccatgccccgcaactgttccattgtcttggcggaaacatcctgtcccgggaatcgcttggcatacatccggcgggcgacctgcatccgtgtctcctcccgactcaccagcatcgcctggttgatcagccgccgcgcgctgaatgtcgcgcccgtggaatgggcgtaaagcctcacgccctgctcgccaacccacgccaccatgcaggcgttgtcggccaggatcctcatcgcggcgtgggtgacggaggtgcccggacccagcttcaggagcgccaactggtcgatcggcaccggggtctcgccatcggcatcgcggaataccagcgccgaggcggtgcaatccagcttgccatgttcgaggtaaagatgtgaccagcggtcggaaaaccgcggcagatcgtgcaggcggcgcat

SEQ ID NO: 1175 - DNA, 1668 bp, Artificial Sequence
  Synthetic Oligonucleotide
atgggttccgtcgtattggataattccgacccggcacgatggaacacgctgtcatcaccctggttggaagcgctggatagccgcggcgtcaacatccggatctcgccgctcgaggcgctcgccaattcggcggacttgtgccaacttgccttttccaaccctctcgaccttttcgcggcccacaggtttttgctgtcgctcctgtactggaaggcgggagccgctaacggcacccgggcgctgcgcgagcggttggtttcgggaaccatgccccagggcgttatcgaatcgattcgggaggaagcatccgcattcaacctttttgatcctgaaaggccattcctccaggatcccgcttgccgggacgacaaaaaggaatccccgccctcctatcttttcgccgaaatggcctcgggaacgaatgtcgcccacttccatcacggggaggacgattcatcccggctatgcctttgctgtgcgactcggggtttattgcgactggcgccctggatgcaatcgggcggcaaggggttgaaacccgccatccacggcgcgccgccgatcatggcgatcgccatgggggacacattgcgtcacaccctgggcctcaacctgattccgtttgacgggcatttgggaaatccgcaatggaccggaccattcaagccgacgcgcgagggggccgtcaccccgctcctcgaggcgttcacctggaacacgcgacgcgtccatttgctcgatccttctccgctggactgctgttccaattgcggatcggaaagcggtttcggtgtcggaccgatcgttttcaaggcgaacgaggcttgcaaggatgattcggatgaggggcaagcgtatgccgacaattggcgcgacccggcggccttttacaccgtgaaggatggcgatactgtcaacaagaccgtcaagtcgaccgacgagtcacaggcctccgtcgccgccgatctcacgcgcctgattcctcaaaagaggggcaaggcggaagtaccggcgccacggtgtctcctgacgcaggccaatccgggacacgcgaactggatccttgtcattccctgcaccaatcccgccaataacaagacattcgatcaccgcttggtggcgatacggggagagctgcccggcgccatcgtaccgggccgtaacgatgtggatgcgattcctgttcttgccggggacccgcgcacgctgcgcaagccctggtcggcgaaccccagccggggcgcgagggtattcgtgaacgccgccagccgcctgcaaaagggtgactgggcggtgttggcggggtccgccggcaagcccttgggacacgacgccgcggccttcgacatcttctcttccctttattggccaatcaggagccgggtttcctcggcgccttcgcgggaagccgcctggatgaccctcaaactgatggcggtttccaacctcggtggtaatgccgccatgggtgatattcgcccgtggaatcatttgaaaaacagtatgcggaaacagaaaagccggaacggcatcaacattgcctacccgaggcggattcccaagggcgttcaccttgaaaccgagcttggggggatcatcaggcgtttttccggcaagggactcgactgggcgggcctttgccaattcctcaacgaccatctttcctga

SEQ ID NO: 1176 - DNA, 1248 bp, Artificial Sequence
  Synthetic Oligonucleotide
atgtttgtccagatccacatgcttcaaagtgttccgcccggcaatctcaaccgggatgattccgggttgcccaagaaatgcgtttttggcggcgtcacccgcgggcgcatcagcagccagtgtctcaagcgcaacatcaggctttcacctctgttcaaggaagctttcgcggaacacttggccgttcgctcgaaataccttcccacgctggtcgccaacgccttgagggaaaacagggccgaagccatccctgaaaaggaaatcgaggcggtcaccgcggccttggccgcgaggttcaagaaagaggaaaaagccagggattccgaacaggacaccggggaggacgatgaggctgccgatgcccccgaggctttggcggtcactccgcaactggtatttttccgccccgcgttcgccggcaagatcgcagaactcgcgcggaacttgaggagcaccgatccgctggcctacaagcttttcaccaagatggaaagaatctcgaaaaacgatgagagaagcgccaaggccggcgtcgaaaaattcatcaggtcggtgttcgaggcgcgggaatcgttgtcggtcgatgtcgcgcttttcggtcgcatgaccaccagcgacatcgtaatggatatcgaagcctcgtgccaggtggcgcatgcgatcgcgacccatgagaccttgattgaaagcgattacttcacggcgatggacgacctcaacgacagcttgggcaagggtgccggtgcggcattcctggggtcgggcgacaccgagacattcttcaattccgccgtttattacaagtacctgaacatggacacgggcgcatttttgcgcaacctccggggtgatgacacctccgtggcctccaaggccgccgcggttctccttgaagccgcggcactctcgacgcccacgggaaaacagaactccttcgccgcccattccgtaccggaattggtgctggtcgaggtctccccaaggaagcagccgatcagttacgccaacgcgttcctggggcccgtgcaaggggaggacctgatggcggcctcggcggacgccctggctgattattgcgggacagtcgcggcggcattttcaccgccgaaaactcaaagattttaccttgccgttggcagggcccggaacttcaggatccccatggaaggtgaacggatcgacagcctggccaacttggcccttgaggttgggaaaggtgtcaaggctgccaacgcgggtgccaagtga

SEQ ID NO: 1177 - DNA, 1110 bp, Artificial Sequence
  Synthetic Oligonucleotide
gtgagcgacaacaccctgttgctgcgcctggcagggcccatgcaggcgtggggcaccgattcccgattccagttgcgccggaccgaatccgttcccggcaagtcgggcgtcatcgggctggttctttgcgccatgggaatcaggcgcgaagaggcctccgcgaaggctgccgaattgtcggccttgaaaatggccgtccgtgtcgaccgggccggccacaccgactgggactaccacaccgtcggcgccggcatcggaatccgtcaagccgaggggggcgtcaagaaaacggcaagcacgggtgaaccggagacccttctgtccaggcgccagtacctttgggacgcctctttcacggtggcgcttcagggtcccggcaacctggttgcggatgccgcccaggcgctgagtgaacccgtttggcctccgttcctcgggcgaaaatgctgcgtgccaaccgaacccgtctttttggccgctggccgtttcgcaaacctcgcggaggcgctgggggcgatcgaatggacggaccatcatggatcgtcgaggaacgggacgacggaactccaggcattcattgaacacgacgaaggcggcccggtcccaccaggtgccttcgtggtttacgacacaccgcgaaccctgcgaaatcccagccatgggccaaggttggtggttcccggcacgatcaatgttcgggttgcgaccgttcaaccggccaacgcaatcggcaggcgaggagtgaactacgccgcggcccaatggcgagcggtgagggaaaggcggttggaactggaccgtttcctctgcgtcttctgcaagatgcccgcggaggatgtgcatcatgtgacctacgaaagggctggaaacgaatccctcgacgacctgaggtcgttgtgcaagatctgccatgacgcctgcacgcaactcgaatacggctccggcatgactcgggaaaggattgatccggcagaacccgcggcgcgcaacgccatcatggagcaggttggcaaacttctttcacaaaggcgcctggcaaggcgtcaggccatacgcgatttggcccgcggcgactttttcgacaatgttcccgatgcggggatatcctga

SEQ ID NO: 1178 - DNA, 783 bp, Artificial Sequence
  Synthetic Oligonucleotide
atgttcctgtcccaattgatcgtcaatacggcgggaaatccggaccaaccccgtcccggcagggaatgggtgcgatccacttacagggtgcatcagcgaatctggatggcttttcccgacgaacacaagcgccatgccgatccgtttttccttggcgcctggtcaacgcctgatggcgtcaagcctcgaaggacggaggcgggattccttttccgcgtcgaaccggatttgccgacccgggttttggtccaatcggttttccgcccggattgggaatatgccttccagaacgccaggcatttgctggcggaaacgccaaatgtgagggaattcaatccggacccagtcgccggccaaccatacaaattcaggctcgccatgctcatggtgaagaggaaaacacacaagggatccgaatcagccgggcccgtcgagcatccgatccgttgcctggttccctcgcccgtggctggcgagccttttcggcccgatccgaaattcacggcttggcgggaaaagctatcctcggaagccttgcggcatgggtttgcgctgggcgagtatccctcaaggctttcagtttcgccgatcaggcacctcatgatgaaaccggacaaggacggcaaggccatgcccttcaacgccgccatgttcgagggcgagttgacctgcaccgacccggaaaaactcaaggccgcgatggttggtggaatcggccgtggcaaggctttcggcatgggcctgctttcgctcgcgatccttcccaagaaagcctccggctag

SEQ ID NO: 1179 - DNA, 29 bp, Artificial Sequence
  Synthetic Oligonucleotide
gtcttccccacgcatgtgggggtgaaccg

SEQ ID NO: 1180 - DNA, 1413 bp, Artificial Sequence
  Synthetic Oligonucleotide
atggaggagagctcaatgtataatttgcttgaacaagattgggtgagggtgctctaccgcagcggagaacctaagctaatctcgctatcgagactgcatcgggatgcggataaattgcatcttgcctacagtaatcccatggaccggctggcggttttccgctttcttctcgctttgggctattggtgttttgccaatacgaaccaaacaccggcacgagataaacccatacctgaagcatggctgtcctggctggaggagaacaagcagtatttgaaactttatggtgacggtcccaggatgtatcaggacccgggcgttaaacgcacacgtcccatcaccgacttgctgcacgaaattcccacgggaaacaatctttcgcatttcaaacacaccttggactatgtctccggcttgtgcctgccctgctgcatacaaggattgctgcgtttccccatttatgcaacctcgggattgccacaactcaaggccagcattaacggcatgcccccattttatgccctgccatgggggaacactctggcagaaactctttacctgaattgggagccacgcgaattgatgggaaccccggcctgggttttcaacaccgttgaccccgaagacggccctgtgccactcttggagggtcttacttcacttgccaggcgctgtgtattacatgaccccatacccggagatggcgcctgttccgcatgtggcgaccgaagcggaagcttggtatattcctgtggttacgacacggctggtgttgttgccaatcccatgtgggaagacccgcacgtatgctacgatgtcaaaaaaaccaaagcaaacaaggcgttgaatttaatctctgaaaaaccaatgatgcaggatagaaactggcaacgtgcattcactggttcttccaagttggagtccggcgatgaaagcatcaatctgctctgcattggagtatcagttaaccaagccgtcataaatgacgtgtgggagtccaccataagaattccgccccgggaagccggaaaagaccccaaaagcataccgaattggacttggattaaccgtcgacttgttggtggatatgaaagaaacagattgtattgggccgataaatcagtttccggaaaacccagggctccgctcagtgaatcgctcatcagcgcagtttctccgcatattcttcattatgcgattcaggagacgggtggttttttgccggataacggtgaattgcccaaatcggtacagattgagtatagaaacatgctgaaagctgttgccaaatcccaggcaccggctgtcacaatagaggatgccatcgcgtccaagtttgtgcataatcagcgtccacagcttgagcaagccaaagcttccaagcaggataaaaaggaggaccaagttgattga

SEQ ID NO: 1181 - DNA, 519 bp, Artificial Sequence
  Synthetic Oligonucleotide
ttgattgaaacatccacagctcaattcatcaaaagaattgcagaactgaagtctggagacctgggtcggctgagacaattgagaggttgtgacctgcatgagaatctggacgggttcgacctgttcaccggcctgtggtggacattgagaaaaaactcgccccgggcgccccgacgtgagattgcctggctcgttaccaaactgtatgcgcagttcccattctctcaagaggacgggctaaccttgcctgtaatccttggacgtatttacaggactctggcaacgcaaaaggaaaaacgaatcttcgccatgaggacggatgccattctgcaagcgcaggcaaaccagttggaacaccccttaagctgggccctgcggatgcttgccctgtatggctacgcttcgctggattggattcaacttaccgacgacctttcggtttggcatgaaatagtgcgacaccgatggacggaggcatttctaacacaatcatcaaaggacaaaaacaaggagaattaa

SEQ ID NO: 1182 - DNA, 1116 bp, Artificial Sequence
  Synthetic Oligonucleotide
atgttaatcgaaatgcacatgattcaaaaccacagcccggcaaatctcaaccgggacgaccttggcgcgcccaagacctgttatttcggcggagtgctacgttcacgcatttccagccaatgcatcaaacgcagcatcagaaccagcgatgattttcagactctgcagggcggggttcgcacacgcaggctggtggaacttatccagctggaagctggggacacagattgcaggaaaagagcacaggaaattctgacctattgcggatttaaacatgaaaaagacaacagcaaaatgctgattttcatgtccagagacaaggtgaaataccttgccgagattatcttggatgaatccctggaaatagcagacgctgcccagaaggttgccgatgtgattacccaggccacgtgttcccccgatattgcgctttttggaaggatgttggaacctgaaacaagcaagactaaatggagagatacaacagtggaggcagccatgcaggttgcacacgccctttccacacacgccgcccgtccggaaatcgattattatgtggcggcagatgacgttaagggagaagatgccggtgccggctttgttgacgaagcgatgtttgcatccgcctgcttctataaatatttctccattgattgggaccaactggttaaaaatttgaaaggcaacgaagaactcgccgcacaaacagttggggcatttatcaagtctgctgcgctcaccaatcccagcggcaaacaaaacagtttcgcagcccataacccgcccgatggcattttggtggaattcaaggatacacccgtcagttatgccaatgctttcgttcgtcccgtaaagcttaccgccgaatcggacttggtggaactcagcataggccaactcgccaactatgttaaagatgtaagcgaagcatattatcccggccacatggaaggcaacgcattttggttctctcccaacggacgccatcccttgttaccacaagacggggacatacaagccgagcaagttggacaactggaagaactgataaagaaaacggttcataaatgcggttatgagtgggaagccatcaagcaaaaaaaagtagaaggctga

SEQ ID NO: 1183 - DNA, 1161 bp, Artificial Sequence
  Synthetic Oligonucleotide
atgagcgccaacaccctattcctaagactggagggaccacttcaatcctggggcgggcatgaggcgaaattttccattcgccgcacttctgatgctcccaccaaatcaggagtctttggcttgctttgcgccgcactgggaattggcagagtcgaagcaggtgaaagctgcctgcccgaactggcgaacttacgcatgggagtgcgcatagacaggctcggtgtccgctggtgggattaccacaccgtgaacgctgggattccgatgcttaaatctgggctagaggcgtctgaagacctcagcgatgtgggcaaagccagggcagaccgactgcttaaaaaagaactgagtttcgacaaacgcgggttgctcagccgtcgcgaatatctggcggatgccagttttctggtggccttgcagggtgaaccttcaacagttcaaaaactggcggaagctctgcaaaaacctgtctggacactatatctgggcagaaagacctgcacaccatcacgccctgtgggagagcatacccccggtaaatatgcgagccttgaggaagcattgttggccatacccgtgcaggtgagggataaacacgaaaccctgccccagtccctccaatgtgttctggactggattccggcttatgatggtgaacccgctccggattgcgcggaaatccactacgacctacccatgtcttttgaccctccccggcatttgccgagatttgtgattcgccgtgaactgcccttaagtgtagatatcgaaacacaacaggttatcattggaagaccctggcgtccggcacgcagtagggccgattacacaaacactcaatataagagagtccgcgcagaacgtctggtgatggatgtcgggctatgcatggtatgcaaggcgcctgccacaacagtgcaacacgtaaactatcgtcgcactggagggagggaagagcctgaagatttgcgcgccctgtgtcggctgtgccacgacgcatgcaccatgctggaatatggcagcggcatgaccatggaccgcatagacccgtgtgaccccgcctggcgtaaccgcatcataagcaaacgcaatgaaatcatcgaattccgctcgctggaacaacgcagacgaaagcttgaccccaaggaggaaaacggatga

SEQ ID NO: 1184 - DNA, 792 bp, Artificial Sequence
  Synthetic Oligonucleotide
atgtatctttctcaattactcatagataccggtggaaatccggacagactcagaccgggacgttcgtggctcaacaatatttacaacgtccaccgcaggctttccatggcctttcccatgcggcaacgaaaagatggtgacccccggttcctgcagccttttaacccggctgactttgagcgtcaccgctttctgttcagggtggacaacaacatcgacggagaggaaaccagagccatggttctggtccagtcatcaatactgccggattggaactacgccttccaaaacgccaccggctttttggcggctcctcctcaggtaaaagaatacaccccaaatttttcccccggacagcagctgcgcttccgcatcctcatcaacgccagcgtaaagcgcaaaatcgaagaaatgaaagacggggactccggaagagttaagacggggaaagtgctgcataagcgtgttgccttcacttgggatgctgatgtttccccttccgatgcacttgccgaatggttcgccaaaaaggcgtccaaactggggtttacgccaattaaaacagagctggttaagcttggctggatatatggctccaaacctgaaccgcgaggtgaaagaccacgaagagaaaatgaataccgccccctgaaatatcgttctgcactgctggaaggatatcttaaagtggatgagccggagttattcaagaagactttggtcacgggaattggcagtgcaaaaagcatgggatttgggctactttccgtaattcccacacaagatgcgtaa

SEQ ID NO: 1185 - DNA, 972 bp, Artificial Sequence
  Synthetic Oligonucleotide
atgcgtaacaaagacctgcgctccatcccaaagatgagagaccgcatcacctacctgtatgtggaacatgcaaaggtggataaaaaacataaatccatagcctttcatgatgccatgggttccacacaggtgccatgtgctggactggctcttttgatgctcgggcccggcgtatccattactcatgccgccataatggtgttggccgaatgtggttgtcttgttgcctgggtgggtgaacaaggcgttcggttttatgcttcaggcgccggcaccacccgcagttctgcaaacctgatgcgtcaagctgccgcatgggctaatcaggataaacatatgaaaatagtgcgcacgatgtacgagatgaggttcatggaaaaactggacacctcatatacccttgcccagattaggggtaaggagggtgcgagagtgcgagacacatatttcaggttgtccaaagaatatggagtcaccatgaaggccagagaataccaaagagacaattggattaaaacagaccctgtcaaccgtgcaatttccgtggcaaactcgtgcctatacggaatatgtcatgctgcaatagtggctgcgggttattctactgccttgggctttatccatacgggaaaacaactctcgttcgtatacgatattgcagacctttataagatggaaacttcagtgcccgctgcctttatggcaacagctgaaggaagtgacagccttgaccggagaacgcgaatagcctgtcgtgaccaattccatcaatttggtttgctgaaaaaaatcgtcgccgacatccatgcccttttcgacattttggaaactccggatgatgaacccgacctggtggatatcgatgccgcagcacccggtgggctgtggaacccggataaaagtataagtccaggcgggcaatcatggggtttggattcacaaggaactgaagatgatggttctgattcttga

SEQ ID NO: 1186 - DNA, 276 bp, Artificial Sequence
  Synthetic Oligonucleotide
atgatggttctgattcttgaaaatgttccaatctcactccgtggtgaaatcacccgttggttgcttgaaataaaagcaggcgtatttgtcggcaacgtgtcagctctggtcagagaaaagatatgggataaagtcaggtcagattgtgccggcggcacttgcctcatggtcttcagtaaacattgcgaacaaggctttgacataaagttttggggcgctgcaggaaaaattgtcacagaatgggaaggtttaaaacttatgactaaacatccgtaa

SEQ ID NO: 1187 - DNA, 29 bp, Artificial Sequence
  Synthetic Oligonucleotide
gtcttccccacgcatgtgggggtgaaccg

SEQ ID NO: 1188 - DNA, 1593 bp, Artificial Sequence
  Synthetic Oligonucleotide
atgactttcaatttgctcgttgaaccgtggattcccgtcctccgtacaaatggacgccctgcgcgagtaggcgtccgggaagcgctaacgactgcgggcgccatccgacagatcgccgcgtcgaacccaatggataacgtcgctctgctccggtttttgctggccgtgctcatgtggtgcaagccgcgtctaagtgacgaagaacgcacacagctcgacgtcgcgaagggcgtcccagaagagtggctggccgaacgactcggcggtgcaagtacgccgtgcgaggagttcaacctgctcggtgacggcaaccggttcttccaggatcgatctaccccaaataacgcgcgccccatcggcgacctgctcgttgagtttccgacagaaaccaagatcgcgcgcttccgccacgtccgagacacgcagtacggcttctgtccggcctgcagcgcgctcggcgttgtgcggttctgcgctttcgccaacgcgtacggcggcggtcgctacacatccgcccttaacgggcctacgcccgcatatgtgatctcgcaccgccccacgctagttggcactctgctgctacactggcctatgaacaatccggtcaaacgatcgccgccgtggctttgtgctgatccgccgtccgaaagcgacctagaccttcccacggccttcgcctggcgctcgcgccgcatttggctaaacgatcccgatgccgacggggattgcgcatactgtggtcaccgaagcacactcattcgacaactcgcgttcaccggggcgtggaagccgccatttgaaaccaaggggcaggagaagaggttctgggagaaggatccgcatctgatcgtcgtggagaaggaccgcgaggcgccagcggaggagacggcagccgatgacagtgacgacgcgccccaccgtgacgccaagagcagcgagcgccgccgcacgagaacaacgctcggtttcccttccccggggtcgcgagtcgcggcacattcgaggttctggcgcagagcccttcgcgctaggatcgggcacgccagtggcaaaaacgcggacgatgcaaccgctgtgatcgttgcgggacccgctgccaacaaagggctttatcaggatgctagcgaagtccgcttgccgcgtctttctaacgatgacggcaccgccgcgtcgattgatgctctggcgaaggcggttgatgctctgagcgccgtgttgaagtgctccacacgcaacccggagcgtcagcaccccgagcacaaggccgcgctcgattcgttggcaccttcgctagaactgggttttcgcgaggatactcaagcgttactgatcccgagcttctcaatcgatcacgcgacagagcgactcttacccgtagtgaataccgtccttcgcgccacgtccgcaggctcgccgctgcgccggcgcgagggagaggcgcgcgcacgcgaggcgttgaatcgcgttctccactcggtcgctgccgcgagcggttcgcccgcgaaatatcaaaatgagcccagcgcgggcgaacaaagggcccgtgaacacaagcgcacgcgcgcgacagagtctaggagaaccaacgcgtga

SEQ ID NO: 1189 - DNA, 1182 bp, Artificial Sequence
  Synthetic Oligonucleotide
atgctgatcgaaatccacatgatccagaaccacagcccgtcaaacctcaatcgcgacgacttaggggcacccaagacctgcctcttcggcggcgttacccgcgcacgaatctcgagccagtgcctcaaacgcagcatccgacgcagcgcggagtttcagcgcgctttggagaaaggcggcggggtccggacgcggcgcttggtcgcaattctgtcggagcgcgcgcacggctcgccctccgcaccccacgacttgatcgagctggtgactaaggcgttcgaaaagggtggggtgaagaaggatcccacgaaggacgacccgcacgcaacgaacattttgttgttcgtgccagaggggacggtagtcgcgatggcgaaagcggtcaaggctgagtacggcaagcccgcggctcaacggacggccgatggcttggctgagacactgacggaactcttcggtcagaaggcgtcagtgccagacattgcgctttgcggacgcatgaccgaacttgactcagacggcctgtttcgcaagatcgactttcgcgttgaggcggcgcttgcagcggctcacgccatctcaacgcacgaggccatcaacgaggtcgattacttcacggctgtcgatgaccaggcggtcgggaccggtgccgggcatgtcaacgaggccatgttcgcatcggcctgcttctacaaacacttctgcatcgactggaaccaacttctcgacaacctcggcggtgacgagccgctggcgagtacgaccgtgtgccagttcctgcgcgctgcggccatgaatgtgccgagcgggaagcaaaagagctttgcggccttcaatccgccggacggcattctagttgaagtcaagcacgaacaccgcctgcccattagctacgcgaacgcgttcgctgatcccgtcccgctcaagactctgcgcggactgattggcgaaagcatcgcgcgcctggggcagcatgttcacgacattacggccgggtacggagtcaaagcgaagcggttctggttttctccggccgggcgccaccggctgacgtggattgaccgaacggctaaggagggtgaaaaggagaagctggccatagacggcgaagatggcacttttgattcgttcgacaaattcgtcagcgccgtaatgcaggaactgggaaggaccgcctcgtga

SEQ ID NO: 1190 - DNA, 1143 bp, Artificial Sequence
  Synthetic Oligonucleotide
gtgactggaagtaccgttttcatacggctggaagggccactacaatcgtggggcgacacgtcgaagttcgtgattcgccgaagcatggaggccccgacgaaatccggcgtccttgggctgatctgttgcgccatgggtctttcgcgagaggccgcgcgcgaggtgctcacagacctgaataccttggttatgggcgtccgtatcgatcgggcgggcatgcgttggtgggactttcacaccgtcggtgccaaggtcggcattctgaatgcaaagggccacgtgaagaagacggccagtacgggcgagtatgaaacactcatcacccggcgcgagtatctcgccgacgcgagctttctcgttgcactgcaaggcgacgatgagctgactaagatcgtgcacgctgcgctcgagtcgcccaagtggccgattttccttggccgcaagtgctgcgcgccaagcgtgccgctactcgctcctccgtcggacggcgaatcctggacgaacccgcaggtacacggcagcttgagcgctgccctcgccgccgtatcctggcgccctcgatacgattccgaatcgccgcccatacctacgacgcgcgacggaagggcggagcttgattgcttgatggagtggcgggccctaagcgacagcgacgtcgcgcccgatgcggccgaggtatggtacgatgtaccggtctgtttcgatccccccgtccacgagccgcggatcgtcacgcgaagcactacggtagtcccgatcgcgcgagcgctccaacaacacactccgccgccgccgcggccgcgcgctgattacaccagcagagagtacaagaagcaacgcgcggcccgtcttgaggctgatggcggtgtgtgcgtcttctgcaaatcgcccgccagcaccgtccagcacgtaagctaccgtcgcgcgggcggcgctgagacgcaggacgacctccgggcgctttgccggctgtgtcacgatgccgtcacgatgatcgaatacggcctgggcatgggcctcgaccggatcgacccgtgccaaccccgttggcgccaagacattctgcgtactcgggccgaaatcgtgcgtttccgcgcgcttcaagtacggcgccgacgccttagccccgacgaggtcgaatga

SEQ ID NO: 1191 - DNA, 747 bp, Artificial Sequence
  Synthetic Oligonucleotide
atgtttctatcgtcgctcctgatcgacaccggcgaaaaccccgaccggccgcgtcccggacgactgtggctgcgcaacatgtaccgcgtacaccagcgactttgcatggcgtttccgactgcagcgcgcagcgaaaacgatccgcagttcgtacaaccctaccagcgggacgacttcattcacgtgcacggatgtcgcacgaacgatcaggcttttctctttcgtgttgattctctcgccggcggcagagtagttgttctgatccagtcggcgatcaagccggattgggattacggattccataatgcgcagcaccttctcgccgcgccacccgccatcaagttgtttgatccgcagctcgcggccgggcaacgcgctcgatttcggctgcaggccaatcctaccaaacgcctgcgccgcgaatcgccaaacgctagcggtgatccgacaccgcaacagtgggtgggcaagcgcgtcgccgtgcccgctgacaagctccaggactggctcgcgcgccgcgcagagagctacggattccacttgcgcgaattgacggagttgtgtccgggatacgtgtacgttagtcgcactccagagtccgccggcggtctacggctgcgatctgtcaggtacgagggtctgctggaagtcactgactccgagtcgctggagcgtgccatcatccgtggcatcggccccgccaaagccttcggcttcggcttgctctcgctggcgccggtccggtaa

SEQ ID NO: 1192 - DNA, 939 bp, Artificial Sequence
  Synthetic Oligonucleotide
atggacgatctgcgctcgctgccccgcttcgacgatagcctcagctatctctatctcgagcatgcccgcatcgagcaggacgacaaggccatcgccttctacgacaaggccggcctcacgcccgtgcccatcgcggcgctggcgctgctgatgctgggccccggcaccaccatcacgcacgcggccatcaaggctctggccgacaacaactgcaccgtcgcctgggtcggcgaggacggcttgcgcttctacgccgccggcaccggcggcacgcgcggcagtgccgccctcctgcgccaggcccggctgatgagccatccgcagttgcgcctggcggtcgtgatgcgcatgtaccgaaagcgcttccccggcggactcgacccgaacctgacgttgcaacagatccgcggcatggagggcatccgcgtccgcgaggcttacgccgccgccagcaaggctaccggcgtgccctggaccgggcggaactacaagcgtggcgactgggccgctgccgaccccgtgaaccgcgcactgtcgaccggcaacgcttgcctttacggcctggttcaggccgccctcctgtcggccggctactcgcccgccctcggcttcatccacaccggcaagcagctctcgttcgtctacgacatcgccgacctgtacaaggccgacctggtcgtgccggccgccttcgaaaccgccggctggcaatgcccgtccgtcgaacgccagatgcgcatcgcctgccgcgccaagttcaaggacgctcgcctcatgcagcgcattctgcccgacatcgccgagctcctcgcgctcgagggcttgcccagcgtcgccgacgacccggcctgggacgttgaatcggccgcgcccggcgcgctctgggacccggacggccgcctcgaagggggcctcaactatggtactgatgttgcttga

SEQ ID NO: 1193 - DNA, 308 bp, Artificial Sequence
  Synthetic Oligonucleotide
atggtactgatgttgcttgaacgcgtcgccccttctgtgcgcggcgaactcacccgctggctcatccagcctcgcaccggcgtcttcgtcgggaccgtctccgccctcgtccgcgacaagctttgggacaaggtcgtacactccctacaggctgccaaaccccgaaaaagcggaaagcgcgccggcgcgattatggtctataccaccaataccgagcagggcttcgacatccgcgtcttcggccaaaccgatcgatccatcgaagacttcgagggcctcatccttgcaaaaaccatcgcccaacccta

SEQ ID NO: 1194 - DNA, 29 bp, Artificial Sequence
  Synthetic Oligonucleotide
gtcttccccacgcatgtgggggtgaaccg

SEQ ID NO: 1195 - DNA, 1434 bp, Artificial Sequence
  Synthetic Oligonucleotide
atgaacgactttaacctgatagaggagccgtggattcctgttatttaccacaatggcaactattgccgtgtcggcatcaagcaggctctttccgatgcccatctcatccgcgacatcgccacctccaaccccatggaccgcgcgggccttctacgctttctcctctctatagtttattggtgccatggaatgccagcccctcaagaaacgtctcggctaggtgatcctttaccggattgcacaccacatcttggtgcaaagacaaattttttctgccttttcgggcagaaacaccgtttttaccaatcaccaacggcaaaccgagaagtaaaaattggtgaactgtttcaagaaattccatccggaaacaatttctggcattttcgacatgtcaccgataaagaacatggatattgcccagcctgttgtgctctaggcctgctgcgccttcctcttttttcagtcagtggattgccagacttgaaatcggggattaatggaactccacccatctatgtctttcattatggcaaatctttagctcaaattctccgaaaaaactggttgccaatgaagcaaaacttgctgggcacgccatgttggatggaccccaccttggttccaccaatcggagaccctatcccgctgttaatcggattaaccgtcccagcacgcaaagtttggctcggacaacccattcaccatggccgttgctctttgtgcgggaacccatcaaaacacctggttttcgaggctcacattcaatccgccggtacgttggaaaattcaaattggcaagacccacatgttgtttatttcctaaaccaacaacaacgaaagtcatgcaaagctcccaatctcgtcgtaggcggtgaatttcaaatggaccgcccttatgccgatcttatggcatgtctcttggaacgggtccaatttcccgcaactgcgacaagccaacttctaattgtcggttttgccacggacaaagctaaaaatatagatgtttgggagagaactgtaactttggtccttaacgaaatgcagacaaccgcagccacagctttttccacctggtggcgaagtgtaagtgcattgtccaacaatgtttacactattattaaaacaaccccctacaatcggcctcgtgggtccaaaccctcgtatgttcactgccatttttcccacatcagaccccatgtggaacatataatatcatctaacatgcatattctagtaagtgaaccaaacgaaggttggcatgaagcacgccgtgagttcagcgcttttttgccgatgttggctcaatccctctctcccggcgtgacctcccaagccgttcaaaagcgccgtgccatcgctcaggccttgccacctaatccctgcccgaaaccggaaccatccagttcaccctccactcaaaaccccaacttgtaa

SEQ ID NO: 1196 - DNA, 489 bp, Artificial Sequence
  Synthetic Oligonucleotide
atgagcgccacccttgaatacattacaaaactgtcccatataaaggccggctcccgcactttggttcgcactcatgccaatctctcattgaaccattccgtggatgcctttgatttgttcaccggtctttggtggcccttgcgccaacaatcacaatttgcaccccgtcgccgcgtggcctggctggtcgccaaacttcacgcagtcagtcctctgccacaccaaccaggccagaccctccccatccagctcgcgaagatttggcataggcagccagacaccaatacaaaaaacaggttccagcgcaaattcgatgatctcctttgccgtcccctggaccaaatggaacccgctttgcaatgggccttgagaacaattggctctgcaaatgagccatccttggactgggtgcaactcaccgacgacctctcccggtgggaacaaccgcaagttcgcgaaaaatgggccgaagtctttttaggcaggtaa

SEQ ID NO: 1197 - DNA, 1179 bp, Artificial Sequence
  Synthetic Oligonucleotide
atgaacaatcaaaataccacacgcatacaaatccatctgcttcaaaaccacgcaccggccaacttgaacagagacgatttgggagcaccaaaaacctgctacttgggcggcgtcctccgctcccgcatctccagccagtgcctcaaacgcagcatccgattgagcccctacttcaaagacctctgcggcggtgttcgcacacgccgcctcgcaaaactcatcactgaccaggttgatggcaacaatgcgacgaagaaaaaagtggccgccatcctgaagaaatgtggtttggaggccaaagagaacgacgaaacaaatatggtcgtttacaccacaaaagaagccatcagggaaatggcaacagccttgagaaacggactcgaagaacccgacattatcgccagattcaaagagcttttgagcacgaatactgctgtcccggacatggcactgtgtggacgcatgttggagacaggagaaatcaaggacaccaacgtcgaagccgccctgcaagccgcccacgccatttccacacacgaggctcgccccgaagtggattactatgtgacggcggatgacatccccggaactgatgccggcgctggttatgtggacgaagccatattcgtttccgcctgttattacaaatacttttccattgattgggcacaattgctccacaacctcaagggctacccgggcaacagaatccatctcgcagcccataccgtcggcgcctttatcaaggcagctgccttggtgactccatccggcaaacaaaacagctatgccgcccacaatccacccgatggtatcctcgtggaaatctcccccacacccatcaattatgccaatgcctttgccaaacccgtggacattggccaacgtgatttaatcggccaaagcattgctcaactcgcccagtacatccacgagatggatgccggtttcaaagtcgttgacccgtccaagcgcttctggttttcgccgggcatgcgcaatcgcttggagacctcacagcgcgccggtgatacagcaggcgaccgccaaaccatccgagtccaggcggtggaggttgatcaactcgaaaacctgatccatcaggtcatcaaggccattgacccgatcctcgactggcaggaagtccaaagaaccattctcaataaccatgaagcctga

SEQ ID NO: 1198 - DNA, 996 bp, Artificial Sequence
  Synthetic Oligonucleotide
atgaaactggacgacctccatatcctccccaaattctccgatggttggagctacctctatgtcgagcattgtcgcgtcgaacgagaacaaaacgccatcgccatctatgacacagatggcatgatccccgtcccttgcgccaacctggctctcttgatgcttggcccgggcacctccatctcccatgcagccataacagttctggcggaccacggctgtttaatcatctggtgcggagaacaaggcgtccgcttctacgccaccggtatgggtgaaacccgcaatgccgcccgcctcctccatcaagccttcatgtggagccacgaaaacctccgtttcgaagtcgtccgccgtctctacgcaatgcgttttacagaaaccctgccatccaacctgtcattatctcaaatccgcggactcgaaggccgccgcgtccgcctggcctatgacaaagcggcccgtgccagcggcatcccctggaaaggccgccagtatgaccgccatcattggacccactccgaccccgtcaaccgtgccctttccaccgccaattcctgcctctacggcctctgtcactccgctattgtctcctcaggtttctcccccgccataggctttatccatactggcaaaatgctctccttcgtctatgatatcgccgacctctacaaaaccgaaatcacagtccccatagctttccaagcggccgcccaaggagacaccaacctcgaacgccgtgtccgcatctcatgccgtgacgcctttgccgaatctcacctcttggcccgtattatccctgacattcaaaaagctcttgcttggcaaccatcccaaaacgaaaactccccccttgattcagaccccgcccttccctctcacctttgggacccggatttaggggccgtgcaaggcggaatccaacaacctgccacatcccctttgcccccaactataccagccccagccccggaatctcatgatggtgctaatccttga

SEQ ID NO: 1199 - DNA, 276 bp, Artificial Sequence
  Synthetic Oligonucleotide
atgatggtgctaatccttgaatcagtcccaccttcactgcgtggagaactcacccgctggctcttggaactcaaagcgggtgtcttcgtcggccgcgtctccgccctcgtccgtgagcgcctttggaataaatcctgccaccacgcccgcaatggcggctgcctcctcatctaccacaccaataacgaacaaggctttaacatcctctcctatggtaatacatccagaactatcgccaacttcgatggactcctcctcgtcaaaatcccaaaataa

SEQ ID NO: 1200 - DNA, 29 bp, Artificial Sequence
  Synthetic Oligonucleotide
gtcttccccacgcatgtgggggtgaaccg

SEQ ID NO: 1201 - DNA, 1641 bp, Artificial Sequence
  Synthetic Oligonucleotide
ttgaaatacaacctgcttgaggagcactggattcctgttctcggaaccgatgggaagcttggctacgtgggtatcaaggatacgctgacccatgcagggcgcatccgttgtatctgcttagcaagcccactcgacatgttcgccgtgcaccggttcctgcttactttgctttattggaaagcagacttagcgggtggggtggaagaggttcgggcgtcgttgctgaagagcgaattgccgagcgcggtgctcggcggtatcaacaaggaagaccattgttttgacctcttcgataaagaatcgccattcctgcaggacacgtctgtatccatctccaaggaaaaagaaaagaagtcggtcggctctttgtttgctgaattagctgtggctactaacatagcccactttcatcacggcgacgatgagagtatgcggctatgcctgccgtgcgcaaccatcggcctgctccgtgtggttccgtggagccaatcaggcggccaaggaaagactccctcggtacacaatgcgccgccaattatggcaatggcaactggcgataacttggcggccacgcttggtttgaaccttgtaccgttggatactaaagcgggcaaagcgcagtggtccggctactttacgccgactgattcgacgagtccaatcccctatctcgaggcgctaacttggaatccccggcgcatccttctcccctcagcccaagaaggcacttgctggtactgcggtgaaagcaatgtacccacggtcgggaaaatcgtgtacatgaaaaacgaaaacacaaaaaagcgtgcagacgagaaattgttcgaatggcaggatccggctgccttttatgctctatacgatgtgagtaagaaatatgacaaagtcaagaacgtgccgtataaaacgataaaaagttcccgggagaacttggctaccgatggccgagacttgcagcgcctggcgcatgacgatccgtttcccgaatctaccgtagtcgtgaagaaccccaagcatgagggttggctcctggtcgttccatgcacaaatcccgcgaacaacaaaacctacgatcatcggcaggttgagctggcacaactttcaccagagacgattcgctccttaccgcctgccgtccccccgtccaggagacagggcatcgacggttggaaagaacccgaaagagtcgagcgcaaggacgttgagcattttgtgccggctgcggtgaggcttcttacgcataccgattgggttacgctatcgaacgctgcctacatggatatgcacgattcaccagcggcgttcgatgtttttagcggcttgtattggggacttcgtgacaagaagaccaaaggacttccgtcgcggaatgtggcgtggttgatgctcaaactgatggcatcagtccccgcacgtgcccgcactcttcatcccaacgccgaattctgcccgctgcagagactgccgaaacgacagagcaatgagcgcgacatggcgtccccctaccctgtttctttcccacgcggtcgtcggcttgaggccgcacttagcgccgcacttgttgacaatctgcgcaagagaaatcccgaacctgttgactggacacgtctatgttacggactagaccaattactcgactaa

SEQ ID NO: 1202 - DNA, 1257 bp, Artificial Sequence
  Synthetic Oligonucleotide
atgtttgtacagattcatatcctccagagcatgccaccaggaaacttaaaccgagatgacgaagggcagccgaaaaagtgtatttttggcggcgtcacgcgcggccgcatcagcagtcagtgcctcaagcgaaatatccgccattctatacaattcaaagaagtgttcggcgatgacctcgcaaccagaacgacatacctgccacgtatggtggccgacgaattgaggaagagcgacccaagcattaccgatgacgaattgaacaaagtcaaggccgcgcttgccagcaaattcaaggctgaaaagcgcggaggcaattcagacgaagcagcagagggtgaggaggcacaagcgcagcccgaaagctcttctgctgtgagcgatggagcagaccggacgggtcaactggtctttttcccaccaccctttgctaaagaaattgctgagcttgtcgtagaactgcgtgggcgcacccctccggcatacaaccggttcattgggaccaaagcaaagctctctaaagctgaagagaaggctctagacaaaacggttgatgagtttgtccagcgagcttccgcggcgagcaagaagctcacggttgacatcggccttttcggcagaatgactaccagtgacctggtcgtgaacgtggaagcagcctgtcaggtggcgcatgccattagcacgcatgagacgctaatcgagagcgactacttcaccgcgatggatgaaaagaagcaggaattcgcatcaactcagaccgagaaaacaggcgctgcctttctcggctctggcgataccgaaacgtttttcaattcagccgtctactacaagtatctcaatctcgacatcgatgccttgaagaagcacctttcctggcaaagcgataaggcagctcttgcagccggggtgcttgtccgcgccgcggcgctatccaatcccacaggcaaacagaacagctttgccgcgcacggcgttcctgaacttatcctcgtcgaagtatcggaagcaaagtgtccaatcagctatgcaaatgccttcctagaacccgttgacggtattaacctcatgcgtgaatcagcggcggcaatgagtaattacatcgacaccgtagtagcagccttctcgccgacagacatgagccgagcgctcctggcagtggggtctgcttcggtagatatcgcaaaagctaaaagagttaacacactcgaagaccttatcaaatccgtggttaaactcgtggagggtaccgcatga

SEQ ID NO: 1203 - DNA, 1095 bp, Artificial Sequence
  Synthetic Oligonucleotide
atgagcagtgaccacaatactttgtttctgcgcttggccggtcccatgcaggcgtggggcacctcatcccgttttcagttgcgccgcactgacctttacccgagcaagtccggcatactgggaatgttgctctgtgccatgggtgttaatcgtgaagattcacggcagccgctcaagctgctgacaccactactcatgggagtacgcgtcgaccggactggaaatcttgattgggattaccagacagcgggagccaagttaggcattcgaagcgccgacggcaaaatcaagataaccgcatcgaccggcgaatacgaaaccttgctttcgcgccgtcaatatctttttgatgcctcatttctggttgcgttacatggcgattcaaccataatcgcctcttgcgccaacgccctgagaaatccgacctggcctttgttccttggaagaaagtgctgcgtcccggccgagcctgtttacgccggcaccgaaagttttgacacgctgacccaagcgctttcgtcggtcccctggcgccccagaatcaacgccattgaccgcgagggtagcggggcgtctgtaacactcgatacatatttggagcagccgccagagagacttgtgcccatgggtgcccggctcgtttccgatgtgcccgtagccttcggtttctataattatgctccgcgtttggttatcaagaatcaggttacggtgccaatgggacaggcaacccaaacacagcgactgagcgcacgtcatggcaacccttacagtgaacacttctatacagtcgcgaggccgagtcgtctgaaacttgataacggcctttgcgtcttctgcaagtcccctgctgtggaagtgcatcatgtgtcctacgaaaatgccggacacgagaccgactctgatctccggtcgttatgcaagacctgtcacgatgcgtgtacgatgctggaatacggtcatggccgaaaagaaagagttgacccttgcaacccggctcaacgcacgaccattctcgaacaaatcaatcgtaatctcaaagagcaacatcctggccggcggcgcgaattgcttaaagctgtgcggtcgacctga

SEQ ID NO: 1204 - DNA, 717 bp, Artificial Sequence
  Synthetic Oligonucleotide
atgtttctttctcttcttaaagttgacttggacattgcccccggacggctctggctccgtaacctttaccgcgttcatcagcgcctgtgcatggcgtttccatcctccgcgcgcaaagagggcgaccctccgttcttggaaccctttcgtcctgatgacttccagcatgttcacggcccgcgcacggaggaacaagcatttcttttccgcattgaccctctacccggcgggaatgctgcgattgtgatgcaatctggaatgaagccggactgggactatgcctttaacaacgctggctatcttcttgccgcgccaccccagttgaagacttatgaaccacaattccagaaccagcagcttctcaggttccgtctgctggcaaaccccacacggaagatagatacgaagacccgccaggatggcaccaaaagcaacggtaagcgagtccccgtggacaaggctaacctcgatgaatggctcatccgccatgccgaaaagtccgggttcaccgtcgagcagttgctcaacgtgcaaacgggctacgtcggcgcttccaatggcaaagatgacgaactcaagcggttcttctacgcccgctacgacggcatactccgtgtggcggatgctgagcatctgcacgattccgtcattcagggcattggctccgccaaaggcttcggcttcgggctgctttctctagcgcgtatcaaggagtag

SEQ ID NO: 1205 - DNA, 924 bp, Artificial Sequence
  Synthetic Oligonucleotide
atgcgtacattacatgaattgccgcgtttccgtgatagatggagccacctctacatggaaatggggcggctggatgttgatgcgaatgggttggtattccagcagggtgagagcttcgtgcgggtgccaattgaccagttaagcatcattatgctgggacccggctccacggttactcatgcggcggtgaaatccctttcccagaataactgcttattatcatggacagggcaggatggtattcggctctatgcggcaagcattggtggcacctacagcgcacggaggatgattcgccaggcgaaactggttagtgacgaggagaaacgtctggaagttgcctggcgtatgtaccgtttccgctttaaagaagcggttcctcaggtggttagtctggagcaaatccggggtatggaaggcatacgcgtgcgtcgcacctatgccgaggcttcagctaaatacggggtggaatggaaaggtcgccagtatgaccaggatgattggaacaaaggtgacccaatcaaccgcgctctatccgcggcgaacgcttgtctctatggagtttgtcacgcaggtattctttcagctggctattcatccgctctgggatttgttcacacgggtaaaatgctaagcttcgtttatgacatcggagacctctacaaaaccgaggttacaatccctactgctttcaggatagctgctcaaaatccaccggaattagaaagagtagtacgcatggagtgccgaaaggtgttccacgaattcagactgatggataggctcttgcctgacatcgcggaggtgctgggtgttagtgatgatactggagaaaacgccgacgagcttgaagggcgcattgtcacgctggctgttggaaccgaagacgggggtttttcttgggaacccgagcgcgagagttag

SEQ ID NO: 1206 - DNA, 189 bp, Artificial Sequence
  Synthetic Oligonucleotide
gtgaaaaaggcaaaggataccggcgtggtaatgcaaatctggacagaccagaacccgcaaggtttttcttaccggcaaactggtgaaagggatcggagatttattgacctggatggtctggcattggttgagttcaaacgcgctcaagagattgtcaaaagcaatttttctgacactagaacaccctag

SEQ ID NO: 1207 - DNA, 1563 bp, Artificial Sequence
  Synthetic Oligonucleotide
gtgaaatacaacttgcttcaagaaccatggattccggtgcttcgtatggatggctcccagactcatgtcggcatacgtgatgccctggcaagatcggggctgctcttgagtctcggcgagcccagtgcgacggacaatctggctctgcttcgattgctgattgccgtcactctgtggtgcaggtctgaacctggctcctcggagattgaagctctgcgggagtcgcgcggaatccctgaaggctggcttgcacgtctggatgaagactcgggcgcatttgaactctttggagatggcccacggttctatcaagacgggagggtgaagtccgaggtgccgggcagaccggcgtccgaccttctctcatacttcccggcggcaactgaaatcaaccacttcagacacatccacgacgacgatgtcgccatctgcccagcgtgttgtgccttggggctcatacgcctcccggtgcttgccattcagggcggcgctgggaagtcgccgtccatcaataatgcgcctcctgtctacttcatacggcgcggtagaacgctgttagacacactcatgttgaatatgcctcgtggcgggccggctgcggatgacagtcccgtgtggaagcccggcccaaggtcgagcagcgagatcggtacactcgaaggattcacgtggcaaccacgagctgtgtggttgggtccgacgagggcgacctcagatagtcggtgcagcaactgtggaagaagcggccccgtcgtatcaagcctggtattcgccaagggtcaggcaagaaaggatgacacacgctcatggagagacccgcacgttcactacacgaaggagcgcacgggcaacgataacgcagatccagacgcccgcgataacgttctgcgcgcatcgcatccgctcaagtacgcggccttggaggcgtccctctggaggaggacagcctcagcgattatgttgtccgtcgaaccacatgagtgcggcacgttgccagccggcgatagctacgacggaacaggaagcgacgcagtcgttgtcgagtgtattgcgccattcacatcccagggaaaggtcttcgatgagcaccggattgagtggcggataccacgcaaggttctccacgacgatgtcctgcgtcgctctgccttcgaggaactcgattggcttggccggttcaacttgaggaagctcctgggaagggcaagaggtgacggccgcatcaggaagcttgcggctaggtgcctagtcaatcccctcatctgcgagacagagcgccgactgttcggttcattcgtgactctgttgtggtcactggcgcaggagacttcgtcagagcagcgaggctcggtggaacgctggcgacgagaagtacttgacgtgctcgcctcgatgattcagcttgcccttacaacctgtgaccccggatcggctctgaaacgcaggcagatgcaacttcgggcggtggaagcgctccggcatgacgccgggatgactgtcacatcgcgtgggcgcgcttccgtcagacacgagcaagggcaattggagggagcgacaagatga

SEQ ID NO: 1208 - DNA, 549 bp, Artificial Sequence
  Synthetic Oligonucleotide
atgaatccaaccgaggtctacgtgcggcgtcttctggctctaggggacggcgaacgagcagaactccgtcacaaacagggtgcctctctcagtgagtccctggagggatttgatttgttcaccggcctctggtggccattgcgacagcgcagtccggcagcaccgcagagagaaacaagttggctggcggcaaagctgatctgtcagtggccgattccgctcgcttcgtccgatgacagcgtgctacctcggttgctcggcagcgccgagcggcgactgtccgctcgctacgcacttcgtttcctgctgcggttcgataggctcttgcaatccccaatggctttgctggaaccgcagcttcaatgggcattgaaggtggtggcacaggcggtagttgccggttcagccaaagggttgaactgggtgcagcttcttgatgacctcgcggtatgggacggaagacccggcagggaatcaaagcacaatgtgcgcgacgcatgggctcgcgcctatctggcgtctagaaacagggagggaaagcgatgttag

SEQ ID NO: 1209 - DNA, 1302 bp, Artificial Sequence
  Synthetic Oligonucleotide
atgttagtcgagattcacatgattcagaaccacagtccgtcgaacctgaaccgagatgaccttggtgcccccaagagctgcacatttggtggcgtaactcgcgcgagaatttcaagccagtgtctgaagcgcagtatccgcaacccaggaaattctaacgacgtacacaacaaaggggcaagccttttcgtcgaagcgatgcgcgaacacacgggaatcaggacgaagtactttcctgaaatggtgcggcaggcgctgaacgactcaagcgtaccagacgaggaatgggacagagtcgtgcaggcttgcacgagtatcgccaagaaggaggtccagataggcgacgaggatgtacaggagcccggcgacagcgatgagcggcacaaactgccgcagctagtcctgttggagcgtactgaggcaaatgcgtttgttcatgtgttggaggcgatgcgtaccagtgacgagtggagcgccagctaccgccagtggatcgcaggcaaactgcagaagcggcctctcgcagctttcctgcgtgaactctcgcgcgcctattcgagacgatcagtggacatcgccatgttcggacgcatgactacttccgatgcgttcgaggacgtcgaagccgcaatgcaggtagctcacgccatatcaacccatcaggcggtttcggatgtggactacttcacggctgtggacgacctgggcgagttgggcggtggtgcaggccacgttgacgaggccatgttcaattccgcctgcttctacaagtacttcgctctagactgggaccaactcatcagtaacctcggtggctcttcctcttccgcactcgcagcgtccgcactgggccatttcattcgtgcggctgccatgacgacaccaaccggcaagcagaactcattcgcagcccacaaccttccagacgggattctcgtagaagtcaagcggaccggcaaaatccctgtcaactacgccaacgcgtttgtcgagcctgtcgcaatgaatgctccgcggggagtcgtgggtatgagcatcgctcaactgggccaatacgttcatcagattgcagagggttacggcattgactctcgtcgcttctggttctcaccgggggggcgctatcaattgacatggattgagcgctgtcagaaaggagagccgaccgagcgggaagttgttgcaggtgaagattcgcacgcgagattcgacgacttcgtgagtgtggttgtgcaagaggtttctggcctcgaatggaacagggtgaaggatccggacggtttcttgccggaggcgacatag

SEQ ID NO: 1210 - DNA, 1110 bp, Artificial Sequence
  Synthetic Oligonucleotide
atgcgcacgctcttcgaccttccacggttccaggatcgctggagctacgtgtacctcgagacggggcgactcgatgtagatgatctcggcctgtgcttccgccaggacacccgaacaacgcgagtgcccatcgaccagctctcggtgttgatgctcggacccggcactacggtgacacacgctgcggtagcggcgctctcgcggaacaactgtctcctggcgtggacagggcaggatggcacgcgactgtatgccgccagtacaggtggaacacacagcgccaaaaggctcatcaggcaggcgtcgctggtgagcgacgatgaatcccgcctgcatattgcctggcgcatgtaccgtttcagattcgcggaatccgtaccagacgtcgtgagtctggagagcataagagggatggagggcctacgtgtgcgcaaagcatacgccgacgccgcccgcgcatatggcatcgactggaagggcaggcgatacaaccagggcaactgggaagctgcggacccggtcaatcgtgcgctatctgctgcaaacgcctgcttgtacggtgtgtgtcacgccgcgatcctctcggccggatactctccgggactcggtttcatccacacgggcaagatgctcagcttcgtctacgacatagcagacctgtacaagacaactctcacgattccgctggcctttcaaaccgcggccgagatgcccgagagtatcgaacgcggcacgcgaatgcgttgccgtacggcgttccacgaattcagactcatggagagacttctgccagatatcgcggaggtgcttggtgttggtaatgatgctggggagagtgccgacgaacttgaggggcgcattgtcgcgatggctcctggagccggcgactggaacctttcttgggaacccgagtgggcgagtgagggacgagttgtggatgaaggccgtcaagacaacgaaggagaccgggtgggtgctgcagatatggtcagacaggaatccacaggggttctcctatcgtcagcacggcatccaaacgaggcaactggtggacttcgagggtctggcgctggtgacagtctctcctcaaccgcggactgttcaggatag

SEQ ID NO: 1211 - DNA, 309 bp, Artificial Sequence
  Synthetic Oligonucleotide
atgatgctggggagagtgccgacgaacttgaggggcgcattgtcgcgatggctcctggagccggcgactggaacctttcttgggaacccgagtgggcgagtgagggacgagttgtggatgaaggccgtcaagacaacgaaggagaccgggtgggtgctgcagatatggtcagacaggaatccacaggggttctcctatcgtcagcacggcatccaaacgaggcaactggtggacttcgagggtctggcgctggtgacagtctctcctcaaccgcggactgttcaggatagcgacactgaaacccgttga

SEQ ID NO: 1212 - protein, 9 aa, Artificial Sequence
  Synthetic Peptide
LAGLIDADG

SEQ ID NO: 1213 - DNA, 990 bp, Artificial Sequence
  Synthetic Csf2
gtgaaaactatcgtcatcaacgccaccctgactaccgtcggccccttgtccatcaccatgcccatcgctgaaggccagatgggcaacaagttcaacaatttccccgtcgtcacgcgcggcatggatgatgacggcaacaagcaggagaccggctacctgccggccaccacgctgcgcggctttctccggcgtgccatcgtcacggatcagatgacgcaggccgccgccgacggcaagccctacaccttgcagaaagcctatgccgacctgatcgggcaggatgcggcgtccgagtcgaaggacgacatcgacctgctcaagatgcgccagacccgcgaggaaaatcccgtcctcgatctgttcggctccggcttgggcatcaagtcgcggcttctggtatcccacttcatgccgacccacaacgtgctgccggaagtcgctaccggcgtccgcaaagacttggaggacaccgatggtgtgctggagtcgctgtcgtcgcccgaccgcgatagctatcttggacgctccggtgcgaacagcaagcgcgctgccgccctgacggtggcaaaggggttggagggcaagattcgcaagacgaagaaggccggcgaggacatcgccgaacttgaggcggcgctgaaggaggcgcagggtatcgtcgcgcgctatgaatccgacatgggcaacatggtcaactcatcgcgcacgctgaccaactattttgcgcttccggcaggcatcgaactcaagggccgcttggtcatcgagaaggcgcgcgaccgcgatctgccgatggtggaacttgcgctgaacgaattgtccaagcgtccgatcttgggggcacaaagcgcccgtggctgcggcgaaatcgaagggacattcgatgttctggtggatggcgttcttgccaagaaaatcagcatcggtggttggcaagcggcgaccgtgaccgatttttgtggcgacgaattagcgaaatcggctgcgtaa
